(19) United States
(12) Patent Application Publication
(10) Pub. No.: US 2023/0235398 A1
(43) Pub. Date: Jul. 27, 2023

(54) Method of Diagnosis of Chronic Kidney Disease with Pharmacogenomics Support

(71) Applicant: Machaon Diagnostics, Inc., Berkeley, CA (US)

(72) Inventors: James S. Kain, Ph.D., Berkeley, CA (US); Michael P. Ero, MT, CLS, MBA, Berkeley, CA (US); James Anderson-Furgeson, Berkeley, CA (US); Jihyun Moon, Berkeley, CA (US)

(73) Assignee: Machaon Diagnostics, Inc., Berkeley, CA (US)

(21) Appl. No.: 17/874,258

(22) Filed: Jul. 26, 2022

Related U.S. Application Data
(60) Provisional application No. 63/225,862, filed on Jul. 26, 2021.

(51) Int. Cl. C12Q 1/6883

(52) U.S. Cl. CPC C12Q 1/6883; C12Q 2600/106; C12Q 2600/118; C12Q 2600/156

(57) ABSTRACT

A method for determining a subject's risk for developing chronic kidney disease (CKD) combined with determining a subject's pharmacogenomic (PGX) profile is described. The method involves obtaining a sample of genetic material from the subject. The genetic material is amplified using primers specific for the genes underlying CKD and PGX. The DNA sequence of the amplified genetic material is determined and compared with the human reference genome sequence. One or more DNA sequence alterations in the amplified genetic material not present in the human reference genome sequence determines the PGX profile of the subject and may indicate that the subject is at risk for developing CKD.

### CROSS-REFERENCE TO RELATED APPLICATIONS

[0001] The present application claims the benefit of U.S. Provisional Patent Application No. 63/225,862 titled “Method for Diagnosis of Chronic Kidney Disease with Pharmacogenomics Support,” filed on Jul. 26, 2021, the contents of which are incorporated in this disclosure by reference in their entirety.

### REFERENCE TO AN ELECTRONIC SEQUENCE LISTING

[0002] The contents of the electronic sequence listing provided as a file titled Sequence listing XML created Jan. 31, 2023 and is 17,412 kilobytes in size is herein incorporated by reference in its entirety.

### BACKGROUND

[0003] Chronic kidney disease (CKD) is defined as a structural (e.g., cysts, tumors, malformations and atrophies) and/or functional defect that persists longer than three months. Stages of CKD are based on the glomerular filtration rate and albuminuria. The final stage is end-stage renal disease (ESRD). Patients with ESRD require dialysis or kidney transplant.

[0004] Globally, CKD is very common with a prevalence of 7-12% of the population for all stages of CKD, depending on the country. Five-year survival rate for ESRD patients receiving dialysis is 40-50%. The five-year survival rate for ESRD patients receiving a kidney transplant from a deceased donor is 86% and improves to 93% when the transplant is from a living donor.

[0005] Causes of CKD include diabetes, high blood pressure, glomerulonephritis, and polycystic kidney disease. Ultrasound, biopsy, and genetics may be used to identify the underlying cause of a patient's CKD. Identifying the risk factors and underlying causes is recommended for optimal treatment by guidelines such as Kidney Disease Improving Global Outcomes (KDIGO).

[0006] Early treatment generally focuses on managing the risk factors by lowering high blood pressure, blood sugar, and cholesterol. Treatment of CKD patients in general is complex because there are frequently co-morbidities such as diabetes or cardiovascular disease. For those on dialysis, infections become a major concern as well. ESRD patients fortunate enough to have received a kidney transplant require immunosuppressives.

[0007] Pharmacogenomics (PGX), also called pharmacogenetics, is a subset of precision medicine where drug choice or drug dose is tailored based on a patient's specific genotype. Drugs are metabolized by the patient's body and in certain cases can be significantly influenced by the patient's genotype. Knowing how a drug may be affected by genotype may allow the physician to use a more appropriate dose that will maximize efficacy while minimizing side effects. This PGX-informed approach stands in contrast to trial-and-error dosing of a patient or a one-size-fits-all dose.

[0008] For example, consider the gene CYP3A5 and the immunosuppressive drug tacrolimus. There is a version (or allele) of CYP3A5 that is very common in the normal population that contains a nonfunctional splice variant. This allele is called CYP3A5*3. People who have CYP3A5*3 require less tacrolimus to reach the same internal concentration as people who have another common version called CYP3A5*1.

[0009] Despite its great promise, PGX is not yet routinely clinically used. The reasons are complex but likely include test turnaround time, test reimbursement, inertia in adopting new paradigms, complexity of the interpretation of results, and rapidly evolving scientific knowledge.

[0010] Current genetic methods for confirming a clinical diagnosis of CKD typically takes longer than two weeks and does not include treatment guidance from PGX. Doctors and patients are always searching for faster testing turnaround times for faster patient diagnosis and better management.

[0011] Therefore, there is a need for an improved method to rapidly identify mutations, polymorphisms and other variants in genes underlying CKD coupled with PGX genotyping for optimized treatment in order to identify, diagnose, treat, and assess the prognosis of an individual.

### SUMMARY

[0012] The present invention is directed to a method for determining a subject's risk for developing or being a genetic carrier for CKD and for informing drug treatment regimens based on the subject's PGX profile. The method includes the steps of obtaining a sample of genetic material from the subject, amplifying the genetic material using two or more primers specific for the genes underlying CKD and PGX, determining the DNA sequence of the amplified genetic material, and comparing the DNA sequence of the amplified genetic material with the DNA sequence from human reference genome or other normal references. One or more DNA sequence alterations in the amplified genetic material may indicate that the subject has a risk for developing CKD or would benefit from a specific drug choice or dose for treatment. The DNA sequence alteration can be a variant, a mutation, a polymorphism, or a structural variant. In one aspect, at least 334 CKD genes and 40 PGX genes are amplified. In another aspect, the genes underlying CKD and PGX are listed in Table 1 and Table 2. The subject's risk for developing or being a genetic carrier for CKD and their PGX profile can be determined within one week of receipt of the sample from the subject. In another aspect, the subject's risk for developing or being a genetic carrier of CKD and their PGX profile is determined within 48 hours of receipt of the sample of from the subject.

[0013] The invention is also directed towards methods for diagnosing CKD and elucidating a subject's PGX profile. The method includes the steps of obtaining a sample of genetic material from the subject, amplifying the genetic material using two or more primers specific for the genes underlying CKD and PGX, determining the DNA sequence of the amplified genetic material, and comparing the DNA sequence of the amplified genetic material with the human reference genome or other normal references. One or more DNA sequence alterations in the amplified genetic material may indicate that the subject has a risk for developing CKD or would benefit from a specific drug choice or dose for treatment. The DNA sequence alteration can be a variant, a mutation, a polymorphism, or a structural variant. In one aspect, at least 334 CKD genes and 40 PGX genes are amplified. In another aspect, the genes underlying CKD and PGX are listed in Table 1 and Table 2. The diagnosis of CKD and the PGX profile can be determined within 48 hours of receipt of the sample from the subject. In another aspect, the subject's risk for developing CKD and their PGX profile are determined within 5 days of receipt of the sample of from the subject.

### DESCRIPTION

[0014] According to one embodiment of the present invention, there is provided a method for rapid detection of variants, mutations, structural variants and polymorphisms associated with CKD and PGX. The time for diagnosing or determining the patient's risk of developing CKD and their PGX profile using the method of the present invention can be as early as 48 hours after receipt of the patient's sample. The method of the present invention can also be used to diagnose CKD and determine their PGX profile within 5 days after receipt of the patient's sample. The method involves analysis of 334 CKD genes and 40 PGX genes, referred to herein as the “genes of interest.”

[0015] As used in this disclosure, except where the context requires otherwise, the term “comprise” and variations of the term, such as “comprising,” “comprises” and “comprised” are not intended to exclude other additives, components, integers or steps. Thus, throughout this specification, unless the context requires otherwise, the words “comprise,” “comprising” and the like, are to be construed in an inclusive sense as opposed to an exclusive sense, that is to say, in the sense of “including, but not limited to.”

[0016] As used in this disclosure, except where the context requires otherwise, the method steps are not intended to be limiting nor are they intended to indicate that each step is essential to the method or that each step must occur in the order disclosed.

[0017] As used herein, “sample” refers to any sample that can be from or derived a human patient, e.g., bodily fluids (blood, saliva, urine etc.), biopsy, tissue, and/or waste from the patient. Thus, tissue biopsies, stool, sputum, saliva, blood, lymph, tears, sweat, urine, vaginal secretions, or the like can be used in the method, as can essentially any tissue of interest that contains the appropriate nucleic acids. The sample may be in a form taken directly from the patient. Preferably, the sample may be at least partially purified to remove at least some non-nucleic acid material.

[0018] The term “DNA sequence” as used herein refers to chromosomal sequence as well as to cDNA sequence.

[0019] The term “amplifying” in the context of nucleic acid amplification is any process whereby additional copies of a selected nucleic acid (or a transcribed form thereof) are produced. Typical amplification methods include various polymerase based replication methods, including the polymerase chain reaction (PCR), ligase mediated methods such as the ligase chain reaction (LCR) and RNA polymerase based amplification (e.g., by transcription) methods.

[0020] An “amplicon” is an amplified nucleic acid, e.g., a nucleic acid that is produced by amplifying a template nucleic acid by any available amplification method (e.g., PCR, LCR, transcription, or the like).

[0021] A “gene” is one or more sequence(s) of nucleotides in a genome that together encode one or more expressed molecules, e.g., an RNA. The gene can include coding sequences that are transcribed into RNA which may then be translated into a polypeptide sequence, and can include associated structural or regulatory sequences that aid in replication or expression of the gene.

[0022] A “set” or “pool” of primers or amplicons refers to a collection or group of primers or amplicons, or the data derived therefrom, used for a common purpose, e.g., identifying an individual with a specified genotype (e.g., risk of developing CKD). Frequently, data corresponding to the primers or amplicons, or derived from their use, is stored in an electronic medium.

[0023] A “structural variant” refers to a variation of a DNA sequence such as, for example, a deletion, duplication, insertion, translocation or inversion.

[0024] A set of oligonucleotide sequences, or primers, have been identified that facilitate the rapid identification of variants, mutations, polymorphisms, and other structural variants associated with CKD and PGX. This set of oligonucleotides detects sequences that are indicative of whether an individual is a carrier for, or has CKD, and their type of PGX profile.

[0025] The primers are used to amplify certain genes underlying CKD and PGX. This includes targeting all exons of the genes, plus 5 base pairs of flanking intronic DNA, plus deep intronic and promoter regions and the 5 prime and 3 prime untranslated regions of the genes, and any structural variants known to be associated with CKD and PGX.

[0026] The DNA used in the method of the invention can be extracted from any source, such as, for example, whole blood, samples from a buccal swab, or it can be from previously extracted genomic DNA samples. Preferably, the DNA is extracted from whole blood using known techniques. Prior to analysis, extracted DNA can be stored for one month at room temperature or 2-8° C. For longer storage of up to 2 years, DNA can be stored frozen at <−20° C. to minimize the degradation of nucleic acid.

[0027] After extraction, the DNA sample is measured and assessed for purity. 30 ng of genomic DNA, at a minimum concentration of 1.7 ng/μL, is preferable for analysis, but as little as 1 ng is sufficient. The concentration of purified DNA should preferably be adjusted to between 2 ng/μL and 25 ng/μL prior to analysis. Optimal DNA purity is an absorbance ratio (A₂₆₀/A₂₈₀) of 1.80 or greater (typical range is 1.60 to 2.00).

[0028] The extracted sample DNA is then amplified. A well-known amplification method, for example, is the polymerase chain reaction (PCR). In PCR, a characteristic piece of the particular nucleotide sequence of interest is amplified with specific primers. If the primer pair finds its target site, a sequence of the genetic material undergoes a million-fold proliferation.

[0029] During the PCR process, the DNA generated is used as a template for replication. This sets in motion a chain reaction in which the DNA template is exponentially amplified. PCR can amplify a single or few copies of a piece of DNA by several orders of magnitude, generating millions or more copies of the DNA piece. PCR can be extensively modified to perform a wide array of genetic manipulations, as known by one of skill in the art.

[0030] In the method described herein, unique primer pool aliquots are used to amplify the region of interest from the sample. The primer pool aliquots contain forward and reverse primer pairs directed towards one or more of the 334 CKD genes or the 40 PGX genes, as listed in Table 1 and Table 2.

TABLE 1
CKD Genes

| Gene | Cytogenetic | OMIM Gene MIM | |
|---|---|---|---|
| Name | Location | Number | Disease Name |
| ACE | 17q23 | 106180 | Renal tubular dysgenesis |
| ACTN4 | 19q13 | 604638 | Focal Segmental Glomerulosclerosis 1 |
| ADAMTS13 | 9q34.2 | 604134 | Thrombotic thrombocytopenic |
| | | | purpura, familial |
| ADCK4 | | | Nephrotic syndrome, type 9 |
| ADCY10 | | 605205 | Hypercalciuria, absorptive, |
| | | | susceptibility to |
| AGT | 1q42-43 | 106150 | Renal tubular dysgenesis |
| AGTR1 | 3q24 | 106165 | Renal tubular dysgenesis |
| AGXT | 2q37.3 | 604285 | Hyperoxaluria, primary, type 1 |
| AHI1 | 6q23.3 | 608894 | Joubert Syndrome 3 |
| ALMS1 | 2p13.1 | 606844 | Alstrom syndrome |
| ANKS6 | 9q22.33 | 615370 | Nephronophthisis 16 |
| APOA1 | 11q23.3 | 107680 | Amyloidosis, familial visceral, 3 or |
| | | | more types |
| APOE | | | |
| APOL1 | | | |
| APRT | 16q24.3 | 102600 | Adenine phosphoribosyltransferase |
| | | | deficiency |
| AQP2 | 12q12-q13 | 107777 | Diabetes insipidus, nephrogenic |
| ARHGDIA | 17q25.3 | 601925 | Nephrotic syndrome type 8 |
| ARL13B | 3q111 | 608922 | Nephronophtisis, Joubert syndrome 8 |
| ARL6 | 3q11.2 | 608845 | Bardet-biedl syndrome 3 |
| ATP6V0A4 | 7q34 | 605239 | Renal tubular acidosis, distal |
| AVPR2 | Xq28 | 300538 | Nephrogenic syndrome of |
| | | | inappropriate diuresis Diabetes |
| | | | insipidus, nephrogenic |
| B9D2 | 19q13.2 | 611951 | Meckel syndrome type 10 |
| BBS1 | 11q13.2 | 209901 | Bardet-biedl syndrome 1 |
| BBS10 | 12q21.2 | 610148 | Bardet-biedl syndrome 10 |
| BBS12 | 4q27 | 610683 | Bardet-biedl syndrome 12 |
| BBS2 | 16q12.2 | 606151 | Bardet-biedl syndrome 2 |
| BBS4 | 15q24.1 | 600374 | Bardet-Biedl Syndrome 4 |
| BBS5 | 2q31.1 | 603650 | Bardet-Biedl Syndrome 5 |
| BBS7 | 4q27 | 607590 | Bardet-biedl syndrome 7 |
| BBS9 | 7p14.3 | 607968 | Bardet-biedl syndrome 9 |
| BMP4 | 14q22-23 | 112262 | Microphthalmia, syndromic 6 |
| BSND | 1p32.1 | 606412 | Bartter Syndrome, Type 4a, neonatal |
| CA2 | 8q21.2 | 611492 | Osteopetrosis with renal tubular |
| | | | acidosis |
| CASR | 3q13 | 601199 | Neonatal severe primary |
| | | | hyperparathyroidism, Hypocalcemia |
| | | | with 7mmune syndrome |
| CC2D2A | 4p15.32 | 612013 | Joubert syndrome with hepatic defect, |
| | | | Joubert syndrome with oculorenal |
| | | | defect, Meckel Syndrome 6, Jouber |
| | | | syndrome 9, COACH syndrome |
| CD151 | 11p15.5 | 602243 | Nephropathy with pretibial |
| | | | epidermolysis bullosa and deafness |
| CD2AP | | | |
| CEP164 | 11q23.3 | 614848 | Senior-Loken syndrome, |
| | | | Nephronopthisis 15 |
| CEP290 | 12q21.32 | 610142 | Joubert syndrome with oculorenal |
| | | | defect, Bardet-biedl syndrome 14, |
| | | | Joubert Syndrome 5, Meckel syndrome |
| | | | 4, Senior-Loken Syndrome 6 |
| CEP41 | 7q32.2 | 610523 | Joubert's syndrome type 15 |
| CFH | 1q31.3 | 134370 | Complement factor h deficiency |
| CFHR5 | 1q31.3 | 608593 | Nephropathy due to CFHR5 deficiency |
| CFI | 4q25 | 217030 | Complement factor 1 deficiency |
| CHD7 | 8q12.2 | 608892 | CHARGE syndrome |
| CLCN5 | Xp11.23 | 300008 | Dent disease nephrolithiasis type 1 |
| | | | hypophosphatemic Rickets |
| CLCNKB | 1p36.13 | 602023 | Bartter syndrome, type 3 and type 4b |
| CLDN16 | 3q28 | 603959 | Hypomagnesemia 3, renal |
| CLDN19 | 1p34.2 | 610036 | Familial primary hypomagnesemia with |
| | | | hypercalciuria and nephrocalcinosis |
| | | | with severe ocular |
| | | | involvementHypomagnesemia 5, renal, |
| | | | with ocular involvement |
| COL4A3 | 2q36-q37 | 120070 | Alport syndrome |
| COL4A4 | 2q35-q37 | 120131 | Alport syndrome; nephrotic syndrome |
| | | | (FSGS 1) |
| COL4A5 | Xq22.3 | 303630 | Alport syndrome |
| COL4A6 | | 303631 | |
| COQ2 | 4q21.23 | 609825 | Coenzyme q10 deficiency |
| COQ6 | 14q24.3 | 614647 | Coenzyme Q10 deficiency, primary, 6 |
| CREBBP | 16p133 | 600140 | Rubinstein Taybi syndrome type 1 |
| CSPP1 | 8q13.1-q13.2 | 611654 | Meckel syndrome, Joubert syndrome |
| | | | 21 |
| CTNS | 17p13 | 606272 | Cystinosis, nephropathic cystinosis, |
| | | | late-onset juvenile or adolescent |
| | | | nephropathic |
| CUBN | 10p13 | 602997 | Megaloblastic anemia 1-finnish type |
| CUL3 | 2q36.2 | 603136 | Pseudohypoaldosteronism, type 2e |
| CYP11B1 | 8q24.3 | 610613 | Congenital adrenal hyperplasia due to |
| | | | 11-beta-hydroxylase deficiency |
| DGKE | 17q22 | 601440 | Nephrotic syndrome type 7 |
| DHCR7 | 11q13.4 | 602858 | Smith-Lemli-Opitz Syndrome |
| DSTYK | 1q321 | 612666 | Congenital Anomalies of the Kidney |
| | | | and the Urinary Tract |
| EGF | 4q25 | 131530 | Hypomagnesemia 4, renal |
| EYA1 | 8q13.3 | 601653 | Branchio-oto-renal syndrome 1 |
| FAN1 | 15q13.2-q13.3 | 613534 | Interstitial nephritis, karyomegalic |
| FGA | 4q31.3 | 134820 | Amyloidosis, familial visceral, |
| | | | hereditary renal |
| FGF20 | 8p22 | 605558 | Renal hypodysplasiaaplasia 2 |
| FGF23 | 12p13.3 | 605380 | Hypophosphatemic Rickets, autosomal |
| | | | dominant Tumoral Calcinosis, |
| | | | hyperphosphatemic, familial |
| FGFR1 | 8p12 | 136350 | Encephalocraniocutaneous |
| | | | Lipomatosis, Kallmann syndrome 2, |
| | | | kal2 |
| FN1 | 2q34 | 135600 | Glomerulopathy with fibronectin |
| | | | deposits 2 |
| FRAS1 | 4q21.21 | 607830 | Fraser syndrome |
| FREM1 | 9p22.3 | 608944 | Bifid nose with or without anorectal |
| | | | and renal anomalies |
| FXYD2 | 11q23.3 | 601814 | Hypomagnesemia 2, renal |
| GDNF | 5p131-p12 | 600837 | Congenital Anomalies of the Kidney |
| | | | and the Urinary Tract |
| GLA | Xq22.1 | 300644 | Fabry Disease |
| GLIS2 | 16p13.3 | 608539 | Nephronophthisis 7 |
| GPC3 | Xq26.2 | 300037 | Simpson golabi behmel syndrome type |
| | | | 1 |
| GRHPR | 9p13.2 | 604296 | Hyperoxaluria, primary, type 2 |
| GSN | 9q33.2 | 137350 | Amyloidosis, finnish type cerebral |
| | | | amyloid angiopathy, gsn-related |
| HNF1B | 17q12 | 189907 | Renal Cysts and Diabetes Syndrome |
| HSD11B2 | 16q22.1 | 614232 | Apparent mineralocorticoid excess |
| INF2 | 14q32.33 | 610982 | Focal Segmental Glomerulosclerosis 5 |
| | | | Charcot-Marie-Tooth disease E |
| INPP5E | 9q34.3 | 613037 | Joubert syndrome with hepatic |
| | | | defectJoubert Syndrome 1 |
| INVS | 9q31.1 | 243305 | Senior-Loken syndrome, |
| | | | Nephronophthisis 2, infantile |
| IQCB1 | 3q13.33; 3q21.1 | 609237 | Senior-loken syndrome 5 |
| JAG1 | 20p12.2 | 601920 | Alagille syndrome type 1 |
| KANK1 | 9p24.3 | 607704 | Nephroticsyndrome |
| KCNJ10 | 1q23.2 | 602208 | Seizures, sensorineural deafness, |
| | | | ataxia, mental retardation, and |
| | | | electrolyte imbalance (sesame |
| | | | syndrome) |
| KCNJ5 | 11q243 | 600734 | Hyperaldosteronism, familial, type 3 |
| KIF7 | 15q26.1 | 611254 | Acrocallosal syndrome |
| KLHL3 | 5q31.2 | 605775 | Pseudohypoaldosteronism, type 2d |
| LAMB2 | 3p21.31 | 150325 | Nephrotic syndrome, type 5, with or |
| | | | without ocular abnormalities Pierson |
| | | | Syndrome |
| LMX1B | 9q33.3 | 602575 | Nail-patella syndrome |
| LRP4 | 11p11.2 | 604270 | Cenani-lenz syndactyly syndrome |
| LYZ | 12q15 | 153450 | Amyloidosis, familial visceral, renal |
| MAGI2 | 606382 | 191170 | |
| MEFV | 16p13.3 | 608107 | Familial Mediterranean fever |
| MKKS | 20p12.2 | 604896 | Bardet-biedl syndrome 6, McKusick- |
| | | | Kaufman syndrome |
| MKS1 | 17q22 | 609883 | Meckel syndrome 1, Bardet-Biedl |
| | | | syndrome 13 |
| MMACHC | 1p34.1 | 609831 | Methylmalonic aciduria and |
| | | | homocystinuria, cblc type |
| MUC1 | 1q22 | 158340 | Medullary cystic kidney disease 1 |
| MYH9 | 22q13.1 | 160775 | Fechtner syndrome; Epstein Syndrome |
| MYO1E | 15q21-q22 | 601479 | Glomerulosclerosis, focal segmental, 6 |
| NEK8 | 17q11.1 | 609799 | Nephronophthisis 9 Renal-heaptic- |
| | | | pancreatic dysplasia 2 |
| NLRP3 | 1q44 | 606416 | Muckle-wells syndrome Familial cold- |
| | | | induced inflammatory syndrome 1 |
| NOTCH2 | 1p12 | 600275 | Acroosteolysis dominant type, Alagille |
| | | | syndrome 2, Hajdu-Cheney Syndrome |
| NPHP1 | 2q13 | 607100 | Bardet-Biedl syndrome, |
| | | | Nephronophthisis 1 (juvenile), Senior- |
| | | | Loken syndrome, Joubert syndrome 4 |
| NPHP3 | 3q22.1 | 608002 | Senior-Loken syndrome, |
| | | | Nephronophthisis 3 (adolescent), |
| | | | Meckel syndrome 7, Renal-hepatic- |
| | | | pancreatic dysplasia |
| NPHP4 | 1p36 | 607215 | Nephronophthisis 4 Senior-Loken |
| | | | syndrome 4 |
| NPHS1 | 19q13.12 | 602716 | Congenital nephrotic syndrome, |
| | | | Finnish type |
| NPHS2 | 1q25.2 | 604766 | Nephrotic syndrome type 2 |
| NR3C2 | 4q31.1 | 600983 | Pseudohypoaldosteronism Type 1, |
| | | | autosomal dominant Hypertension, |
| | | | Early-Onset, Autosomal Dominant, |
| | | | With Exacerbation in Pregnancy |
| OCRL | Xq25 | 300535 | Dent disease 2 Lowe syndrome |
| OFD1 | Xp22.2 | 300170 | Joubert syndrome type 10, |
| | | | Orofaciodigital syndrome I, Golabi- |
| | | | Behmel syndrome, type 2 |
| PAX2 | 10q24.31 | 167409 | Renal coloboma syndrome, FSGS 7, |
| | | | Papillorenal Syndrome, PAPRS |
| PDSS2 | 6q21 | 610564 | Coenzyme q10 deficiency, primary, 3 |
| PHEX | Xp22.2-p22.1 | 300550 | Hypophosphatemic rickets |
| PKD1 | 16p13.3 | 601313 | Polycystic kidney disease 1 |
| PKD2 | 4q22.1 | 173910 | Polycystic kidney disease 2 |
| PKHD1 | 6p12.3-p12.2 | 606702 | autosomal recessive polycystic kidney |
| | | | disease, Polycystic and hepatic disease |
| PLCE1 | 10q23.3 | 608414 | Nephrotic syndrome type 3 |
| PTPRO | 12p13.3-p13.2; | 600579 | Nephrotic syndrome, type 6 |
| | 12p13-p12 | | |
| REN | 1q32.1 | 179820 | Renal tubular dysgenesis |
| | | | hyperuricemic nephropathy, familial |
| | | | juvenile 2 |
| RET | 10q11.21 | 164761 | Renal agenesis, bilateral |
| ROBO2 | 3p12.3 | 602431 | Vesicoureteral reflux 2 |
| RPGRIP1L | 16q12.2 | 610937 | Meckel syndrome 5, Joubert syndrome |
| | | | 7, COACH syndrome |
| SALL1 | 16q12.1 | 602218 | Townes-Brocks Branchiootorenal-like |
| | | | Syndrome |
| SALL4 | 20q13.2 | 607343 | Acro-renal-ocular syndrome, Duane- |
| | | | Radial Ray Syndrome IVIC Syndrome |
| SCARB2 | 4q21.1 | 602257 | Epilepsy, Progressive Myoclonic, 4 with |
| | | | or without Renal Failure |
| SCNN1A | 12p13.31 | 600228 | Pseudohypoaldosteronism, Type I |
| SCNN1B | 16p12.2 | 600760 | Liddle syndrome |
| SCNN1G | 16p12 | 600761 | Pseudohypoaldosteronism, type 1 |
| | | | Liddle Syndrome |
| SDCCAG8 | 1q43 | 613524 | Senior loken syndrome type 7, Bardet- |
| | | | Biedl Syndrome 16 |
| SEMA3E | 7q21.11 | 608166 | Charge syndrome |
| SIX1 | 14q23.1 | 601205 | Branchio-oto-renal syndrome |
| SIX2 | 2p21 | 604994 | Renal hypodysplasia |
| SIX5 | 19q13.32 | 600963 | Branchio-oto-renal syndrome 2 |
| SLC12A1 | 15q21.1 | 600839 | Bartter syndrome, type 1, antenatal |
| SLC12A3 | 16q13 | 600968 | Gitelman syndrome |
| SLC22A12 | 11q13.1 | 607096 | Hypouricemia, renal, 1, rhuc1 |
| SLC34A1 | 5q35.3 | 182309 | Fanconi renotubular syndrome 2 |
| | | | hypercalcemia, infantile, 2 |
| | | | nephrolithiasis, osteoporosis, |
| | | | hypophosphatemic, 1 |
| SLC34A3 | 9q34.3 | 609826 | Hypophosphatemic rickets with |
| | | | hypercalciuria, hereditary |
| SLC3A1 | 2p21 | 104614 | Cystinuria |
| SLC4A1 | 17q21.31 | 109270 | Renal tubular acidosis, distal |
| SLC4A4 | 4q13.3 | 603345 | Renal tubular acidosis, proximal, with |
| | | | ocular abnormalities and mental |
| | | | retardation |
| SLC5A2 | 16p11.2 | 182381 | Renal glucosuria |
| SLC7A9 | 19q13.1 | 604144 | Cystinuria |
| SLC9A3R1 | 17q25.1 | 604990 | Nephrolithiasis, osteoporosis, |
| | | | hypophosphatemic, 2 |
| SLIT2 | 4p152 | 603746 | Congenital Anomalies of the Kidney |
| | | | and the Urinary Tract |
| SMARCAL1 | 2q35 | 606622 | Schimke 12mmune-osseous |
| | | | dysplasiaSchimke's immunoosseous |
| | | | dystrophy |
| TCTN1 | | | |
| TMEM216 | 11q12.2 | 613277 | Joubert syndrome 2, Meckel syndrome |
| TMEM237 | 2q33.1 | 614423 | Joubert syndrome type 14 |
| | | | Nephronophtisis 11, Meckel Syndrome |
| TMEM67 | 8q22.1 | 609884 | 3, Joubert syndrome 6, COACH |
| | | | syndrome |
| TNFRSF1A | 12p1331 | 191190 | Autosomal dominant periodic fever |
| | | | syndrome |
| TRAP1 | 16p133 | 606219 | Congenital Anomalies of the Kidney |
| | | | and the Urinary Tract |
| TRIM32 | 9q33.1 | 602290 | Bardet-biedl syndrome 11 |
| TRPC6 | 11q22.1 | 603652 | Focal Segmental Glomerulosclerosis 2 |
| TRPM6 | 9q21.13 | 607009 | Hypomagnesemia 1, intestinal |
| TSC1 | 9q34 | 605284 | Tuberous Sclerosis-1 |
| TSC2 | 16p13.3 | 191092 | Tuberous sclerosis-2 |
| TTC21B | 2q24.3 | 612014 | Nephronophthisis 12 |
| TTC8 | 14q31.3 | 608132 | Bardet-Biedl Syndrome 8 |
| TTR | 18q12.1 | 176300 | Amyloidosis, hereditary, transthyretin- |
| | | | related |
| UMOD | 16p12.3 | 191845 | Medullary cystic kidney disease 2 |
| | | | hyperuricemic nephropathy |
| | | | glomerulocystic kidney disease |
| UPK3A | 22q1331 | 611559 | Renal hypodysplasia, urogenital |
| | | | dysplasia |
| VHL | 3p25.3 | 608537 | Von Hippel-Lindau Syndrome |
| VIPAS39 | 14q24.3 | 613401 | Arthrogryposis, renal dysfunction, and |
| | | | cholestasis 2; arcs2 |
| VPS33B | 15q26.1 | 608552 | Arthrogryposis, renal dysfunction, and |
| | | | cholestasis 1; arcs1 |
| WDPCP | 2p15 | 613580 | Bardet-Biedl syndrome |
| WDR19 | 4p14 | 608151 | Senior-Loken syndrome, Short-rib |
| | | | thoracic dysplasia 5, Nephronophthisis |
| | | | type 13, Cranioectodermal dysplasia |
| WDR35 | 2p24.1 | 613602 | Short rib-polydactyly syndrome, |
| | | | Verma-Naumoff type, Short rib- |
| | | | polydactyly syndrome (Jeune's |
| | | | syndrome) type 7, Cranioectodermal |
| | | | dysplasia type 2 |
| WNK1 | 12p13.33 | 605232 | Pseudohypoaldosteronism, type 2c |
| WNK4 | 17q21.2 | 601844 | Pseudohypoaldosteronism, type 2b |
| WT1 | 11p13 | 607102 | Denys-Drash syndrome, Frasier |
| | | | syndrome, Nephrotic syndrome type 4, |
| | | | Wilms tumor type 1 |
| XDH | 2p23.1 | 607633 | Xanthinuria, type i |
| XPNPEP3 | 22q13.2 | 613553 | Nephronophthisis-like nephropathy 1 |
| ZNF423 | 16q12.1 | 604557 | Nephronophthisis-14 Joubert |
| | | | syndrome 16 |
| ABCG2 | | | Susceptibility to Gout |
| ALG1 | | | Congenital disorder of glycosylation, |
| | | | type Ik |
| ALG8 | 11q14.1 | 608103 | Polycystic liver disease 3 with or |
| | | | without kidney cysts |
| ANLN | 7p14.2 | 616027 | Focal Segmental Glomerulosclerosis 8 |
| ANOS1 | Xp22.31 | 300836 | Hypogonadotropic hypogonadism 1 |
| | | | with or without anosmia (Kallmann |
| | | | syndrome 1) |
| AP2S1 | 19q13.32 | 602242 | Hypocalciuric hypercalcemia, familial |
| | | | type 3 |
| APOPT1 | 14q32.33 | 616003 | Mitochondrial Complex 4 deficiency |
| ARHGAP24 | 610586 | | |
| ARMC9 | | | Joubert syndrome 30 |
| ATP6V1B1 | 2p13.3 | 192132 | Renal tubular acidosis with deafness |
| ATP7B | 13q14.3 | 606882 | Wilson Disease |
| ATXN10 | | | Spinocerebellar ataxia 10 |
| B2M | 15q21.1 | 109700 | Amyloidosis, familial visceral |
| B9D1 | 17p11.2 | 614144 | Meckel syndromeMeckel-gruber |
| | | | syndrome type 9 |
| BBIP1 | 10q25.2 | 613605 | Bardet-biedl syndrome 18 |
| BCS1L | 2q35 | 603647 | Mitochondrial complex 3 deficiency, |
| | | | nuclear type 1 |
| BICC1 | | | |
| BMP7 | | 112267 | CAKUT |
| C2CD3 | | | Orofaciodigital syndrome XIV |
| C3 | 19p13.3 | 120700 | Complement component 3 deficiency |
| CACNA1H | | | |
| CCDC28B | | | Bardet-Biedl syndrome 1, modifier of |
| CD46 | | | |
| CDC5L | 6p21 | 602868 | Congenital Anomalies of the Kidney |
| | | | and the Urinary Tract |
| CDKN1C | 11p15.5 | 600856 | Beckwith-wiedemann syndrome |
| | | | IMAGE syndrome |
| CEP104 | 1p36.32 | 616690 | Joubert syndrome 25 |
| CEP83 | 12q22 | 615847 | Nephronophthisis 18 |
| CFAP418 | | | Bardet-Biedl syndrome 21 |
| CFB | | | |
| CFHR1 | | | |
| CFHR3 | | | |
| CHD1L | | | |
| CHRM3 | 1q43 | 118494 | Prune belly syndrome, Eagle-barrett |
| | | | syndrome |
| CHRNA3 | | | Bladder dysfunction, autonomic, with |
| | | | impaired pupillary reflex and |
| | | | secondary CAKUT |
| CLCN2 | | | |
| CLCNKA | 1p36.13 | 602024 | Bartter's Syndrome Type 4b, Neonatal |
| CLDN10 | | | |
| CNNM2 | 10q24.32 | 607803 | Hypomagnesemia type 6 |
| | | | Hypomagnesemia, seizures, and |
| | | | mental retardation |
| COL4A1 | 13q34 | 120130 | Hereditary angiopathy with |
| | | | nephropathy, aneurysms and Msucle |
| | | | cramps (HANAC) |
| COQ8B | 19q13.1 | 615567 | Nephrotic syndrome, type 9 |
| COX10 | 17p12 | 602125 | Mitochondrial Complex 4 deficiency |
| COX14 | 12q13.12 | 614478 | Mitochondrial Complex 4 deficiency |
| COX20 | 1q44 | 614698 | Mitochondrial Complex 4 deficiency |
| COX6B1 | 19p13.12 | 124089 | Mitochondrial Complex 4 deficiency |
| COX8A | 11q13.1 | 123870 | Mitochondrial Complex 4 deficiency |
| CPLANE1 | | | Joubert |
| CPT2 | 1p32 | 600650 | Lethal neonatal carnitine |
| | | | palmitoyltransferase 2 deficiency |
| CRB2 | 9q33.3 | 609720 | FSGS 9 Ventriculomegaly with cystic |
| | | | kidney disease |
| CRKL | | | Congenital Anomalies of the Kidney |
| | | | BMP4 and Urinary Tract (CAKUT) |
| CTU2 | | | |
| CYP24A1 | 20q13.2 | 126065 | Hypercalcemia infantile, 1 |
| CYP27B1 | | | |
| DACH1 | | | |
| DCDC2 | 6p22.3 | 605755 | Nephronophthisis 19 |
| DIS3L2 | 2q37.1 | 614184 | Perlman's syndrome |
| | | | (nephroblastomatosis, gigantism) |
| DLC1 | 604258 | 603089 | |
| DLG1 | 4q22.1 | 600980 | CAKUT |
| DMP1 | | | Hypophosphataemic rickets |
| EHHADH | 3q27.2 | 607037 | Fanconi renotubular syndrome 3 |
| EIF2AK3 | 2p12 | 604032 | Wolcott-Rallison Syndrome |
| EMP2 | 16p13.13 | 602334 | Nephrotic syndrome type 10 |
| ENPP1 | 6q23.2 | 173335 | Hypophosphataemicrickets |
| ETFA | 15q23-q25 | 608053 | Glutaric aciduria 2a |
| ETFB | 19q13.3 | 130410 | Glutaric acidemia 2b |
| ETFDH | 4q32.1 | 231675 | Glutaric acidemia 2c |
| FAH | 15q25.1 | 613871 | tyrosinemia, type 1 |
| FAT1 | 600976 | 604373 | |
| FOXC2 | 16q24.1 | 602402 | Lymphedema-distichiasis syndrome |
| | | | with renal disease and diabetes |
| | | | mellitus |
| FOXP1 | | 605515 | CAKUT |
| FREM2 | 13q13.3 | 608945 | Fraser syndrome |
| FRTS | | | |
| G6PC | 17q21.31 | 613742 | Glycogen storage disease la |
| GALNT3 | 2q24.3 | 601756 | Tumoral calcinosis, |
| | | | hyperphosphatemic, familial, hftc |
| GANAB | | | Polycystic kidney disease 3 |
| GATA3 | 10p14 | 131320 | Hypoparathyroidism, deafness, renal |
| | | | disease syndrome |
| GATM | | | Fanconi renotubular syndrome 1 |
| GLI3 | 6p14.1 | 165240 | Pallister-Hall syndrome |
| GLIS3 | 9p24.2 | 610192 | Diabetes Mellitus, Neonatal, With |
| | | | Congenital Hypothyroidism |
| GNA11 | 19p13.3 | 139313 | Hypocalciuric hypercalcemia, type 2 |
| GREM1 | | | |
| GRIP1 | 12q14.3 | 604597 | Fraser syndrome |
| HNF4A | 20q13.12 | 600281 | Renal cysts and diabetes syndrome |
| | | | Hyperinsulinism due to HNF4A |
| | | | deficiency; Fanconi renotubular |
| | | | syndrome 4, with maturity-onset |
| | | | diabetes of the young |
| HOGA1 | 10q24.2 | 613597 | Primary hyperoxaluria type 3 |
| HOXA13 | 7p15.2 | 142959 | Hand-foot-uterus syndrome |
| HOXD13 | 2q311 | 142989 | Vacterl association with hydrocephalus |
| HPRT1 | Xq26.2-q26.3 | 308000 | Kelley-Seegmiller Syndrome Lesch- |
| | | | Nyhan Syndrome |
| HPSE2 | 10q24.2 | 613469 | Ochoa syndromeUrofacial syndrome 1 |
| IFT122 | 3q21.3-q22.1 | 606045 | Cranioectodermal dysplasia type 1 |
| IFT140 | 16p13.3 | 614620 | Short rib-polydactyly syndrome |
| | | | (Jeune's syndrome) type 9 |
| IFT172 | 2p23.3 | 607386 | Bardet-Biedl syndrome, Short rib- |
| | | | polydactyly syndrome (Jeune's |
| | | | syndrome) type 10 |
| IFT27 | 22q12.3 | 615870 | Bardet-Biedl syndrome 19 |
| IFT43 | 14q24.3 | 614068 | Cranioectodermal dysplasia type 3 |
| IFT74 | | | Bardet-Biedl |
| IKBKAP | 9q31 | 603722 | Familial dysautonomia, Hereditary |
| | | | sensory and autonomic neuropathy |
| | | | type 3, hsan3 |
| ITGA3 | 17q21.33 | 605025 | Interstitial lung disease, nephrotic |
| | | | syndrome, and epidermolysis bullosa, |
| | | | congenital |
| ITGA8 | 10p13 | 604063 | Renal hypodysplasia-aplasia 1 |
| ITGB4 | 17q25.1 | 147557 | Epidermolysis bullosa, junctional, with |
| | | | pyloric atresia |
| KCNJ1 | 11q24.3 | 600359 | Bartter's syndrome, type 2 |
| KCNQ1OT1 | | | Beckwith-Wiedemann syndrome |
| KCTD1 | 18q11.2 | 613420 | Scalp-Ear-Nipple Syndrome |
| KIF12 | | | CAKUT |
| KIF14 | 1q32.1 | 611279 | Meckel syndrome 12 |
| LCAT | 16q22.1 | 606967 | Norum disease |
| LMNA | 1q22 | 150330 | Atypical Werner syndrome |
| | | | Laminopathy type Decaudain- |
| | | | Vigouroux LMNA-related |
| | | | cardiocutaneous progeria syndrome, |
| | | | Restrictive Dermopathy, Lethal |
| LRIG2 | 1p13.1 | 608869 | Ochoa syndrome, Urofacial Syndrome |
| | | | 2 |
| LZTFL1 | 3p21.31 | 606568 | Bardet Biedl syndrome type 17 |
| MAFB | 20q12 | 608968 | Multicentric carpo-tarsal osteolysis |
| | | | with or without nephropathy |
| MAGED2 | Xp11.21 | 300470 | Bartter syndrome, type 5, antenatal, |
| | | | transient |
| MMUT | 6p12.3 | 609058 | Vitamin B12-unresponsive |
| | | | methylmalonic acidemia type mutO |
| MOCOS | | | Xanthinuria |
| MYCN | 2p24.3 | 164840 | Feingold syndrome |
| NEK1 | 4q33 | 604588 | Short rib-polydactyly syndrome |
| | | | (Jeune's syndrome) type 6 |
| NSD1 | 5q35 | 606681 | Sotos syndrome 1; Beckwith- |
| | | | Wiedemann syndrome, BWS |
| NUP107 | 12q15 | 607617 | Nephrotic syndrome, type 11 |
| NUP205 | 7q33 | 614352 | Nephrotic syndrome, type 13 |
| NUP93 | 16q13 | 614351 | Nephrotic Syndrome, Type 12 |
| PBX1 | | 176310 | Congenital anomalies of kidney and |
| | | | urinary tract syndrome with or without |
| | | | hearing loss, abnormal ears, or |
| | | | developmental delay |
| PLCG2 | | | |
| PMM2 | 16p13.2 | 601785 | Congenital disorder of glycosylation, |
| | | | type Ia |
| PTHB1 | | | Bardet-Biedl syndrome 9 |
| SARS2 | 19q13.2 | 612804 | Hyperuricemia, pulmonary |
| | | | hypertension, renal failure and |
| | | | alkalosis |
| SGPL1 | 603729 | | Nephrotic syndrome, type 14 |
| SLC26A1 | | | Nephrolithiasis, calcium oxalate |
| SLC2A2 | 3q26.2 | 138160 | Fanconi-Bickel syndrome |
| SLC2A9 | 4p16.1 | 606142 | Hypouricemia, renal, 2 |
| SLC36A2 | 5q33.1 | 608331 | Hyperglycinuria |
| SLC41A1 | | | |
| SLC5A1 | | | Renal Glucosuria |
| SLC6A19 | 5p15.33 | 608893 | Hartnup Disorder Hyperglycinuria |
| SLC6A20 | 3p21.31 | 605616 | Hyperglycinuria |
| SLC7A7 | 14q11.2 | 603593 | Lysinuric protein intolerance |
| SMC1A | Xp11.22 | 300040 | Cornelia de Lange syndrome |
| SOX17 | 8q11.23 | 610928 | Vesicoureteral Reflux 3 |
| SOX18 | 20q13.33 | 601618 | Hypotrichosis-lymphedema- |
| | | | telangiectasia-renal defect syndrome |
| SRGAP1 | | 606523 | |
| TBX18 | 6q14.3 | 604613 | Congenital hydronephrosisCongenital |
| | | | anomalies of Kidney and Urinary Tract |
| | | | 2 |
| TCTN2 | 12q24.31 | 613846 | Meckel-gruber syndrome type 8, |
| | | | Joubert syndrome 24 |
| TCTN3 | 10q24.1 | 613847 | Joubert syndrome 18, Orofaciodigital |
| | | | syndrome 4 |
| TFAP2A | 6p24.3 | 107580 | Branchiooculofacial Syndrome |
| THBD | | | |
| TMEM107 | | | |
| TMEM138 | qq112.2 | 614459 | Joubert syndrome 16 |
| TNXB | 6p21.33-p21.32 | 600985 | Vesicoureteral Reflux 8 Ehlers-Danlos |
| | | | syndrome due to tenascin-X deficiency |
| TP63 | 3q28 | 603273 | EEC syndrome, Ectrodactyly, |
| | | | ectodermal dysplasia, and cleft |
| | | | lip, palate syndrome 3 |
| VDR | 601769 | | |
| WDR73 | 15q25.2 | 616144 | Galloway-Mowat syndrome |
| WFS1 | 4p16.1 | 606201 | Wolfram syndrome type 1 |
| WNT4 | 1p36.12 | 603490 | SERKAL syndrome Mullerian aplasia |
| | | | and hyperandrogenism |
| XPO5 | 607845 | | |
| ACTG1 | | | Congenital anomalies of kidney and |
| | | | urinary tract |
| ANKFY1 | 607927 | | |
| ATP6B1 | | | Distal renal tubular acidosis 2 with |
| | | | progressive sensorineural hearing loss |
| FAM20A | 17q24.2 | 611062 | Amelogenesis imperfecta- |
| | | | nephrocalcinosis |
| | | | syndromeAmelogenesis imperfecta |
| | | | type IG (enamel-renal syndrome) |
| FGF10 | 5p13-p12 | 602115 | Lacrimoauriculodentodigital syndrome |
| ITSN2 | 604464 | 164860 | |

TABLE 2
PGX Genes
Gene Name

ABCG2
ADRA2A
ANKK1
APOE
COMT
CYP1A2
CYP2C19
CYP2C9
CYP2D6
CYP3A4
CYP3A5
DPYD
F2
F5
GRIK4
HTR2A
HLA-B
MTHFR
OPRM1
SLCO1B1
TPMT
VKORC1
ABCB1
CYP2B6
CYP2C8
DBH
DRD1
DRD4
GABRA6
GABRP
HLA-A
HCP5
HTR2C
ITGB3
KIF6
OPRD1
OPRK1
UGT1A1
UGT2B15
UGT2B7

[0031] The primers used to amplify the sequences are listed in the sequence listing.

[0032] Following standard techniques, the amplified sequences, or amplicons, are purified and a library is made with the purified amplicons. The library contains multiple sequences from different areas of the 374 total genes of interest. The library made from the amplicons is then amplified and sequenced.

[0033] The DNA sequence of the library may be determined by any suitable method. For example, the DNA sequence may be determined by Sanger sequencing (chain termination), pH sequencing, pyrosequencing, sequencing-by-hybridization, sequencing-by-ligation, etc. Exemplary sequencing systems include pyrosequencing (454 Life Sciences), Illumina (Solexa) sequencing, sequencing by ligation (SOLiD, Applied Biosystems), long read sequencing (PacBio or Oxford Nanopore Technologies) and Ion Torrent Systems' pH sequencing system.

[0034] After sequencing, the DNA sequence of the library is mapped with one or more reference sequences to identify sequence variants. For example, the base reads are mapped against a reference sequence, which in various embodiments is presumed to be a “normal” non-disease sequence. The human reference genome sequence (e.g., hg19 or hg38) is generally used as the reference sequence. A number of computerized mapping applications are known, and include GSMAPPER, ELAND, MOSAIK, and MAQ. Various other alignment tools are known, and could also be implemented to map the DNA sequence of the amplicon library.

[0035] Based on the sequence alignments and mapping results, plus available information including, for example, information from human mutational databases and other reference databases, sequence variants in the amplified amplicons are identified. Copy number (i.e., deletions or duplications) may be inferred by analyzing the relative amplicon read depths; deletions will have a statistically significant decrease in relative amplicon read depth spanning the deleted region while duplications will have a statistically significant increase in relative amplicon read depth spanning the duplicated region. Furthermore, any sequence variations, including variants associated with CKD or PGX, disease-associated polymorphisms, benign polymorphisms and other known variants of undetermined significance can be determined to be homozygous, heterozygous, or hemizygous. Any variations in the gene analyzed as compared to the normal control gene can be classified as pathogenic, likely pathogenic, uncertain, likely benign or benign, as recommended by the American College of Medical Genetics (ACMG).

### EXAMPLES

### Example 1

[0036] DNA was extracted from the whole blood of Patient 1 using known procedures. The extracted sample DNA was then PCR amplified. The complete set of two unique primer pool aliquots were used with the extracted sample DNA. In the present example, the 374 target genes were amplified and analyzed.

[0037] Following amplification of the DNA, the amplicons were purified. A library was then made with the purified amplicons. The library was amplified and sequenced. After sequencing, the sequence of the amplicons from the sample were compared to a control reference sequence comprising the human genome (hg38) sequence.

[0038] A heterozygous mutation in the COL4A4 gene was identified in Patient 1. The patient has a very rare heterozygous nonsense mutation (c.2906C>G, p.Ser969Ter) in exon 32 of the COL4A4 gene. This mutation has a minor allele frequency of 0.00006 in the ExAC database. Truncation mutations such as this one are typically damaging to the protein. It is listed as pathogenic 11 times in the LOVD Gene Variant database. It was found in Alport patients with renal failure between the ages of 20 and 30; four were homozygous and one was heterozygous. This mutation is enriched, particularly in patients of British origin.

### Example 2

[0039] DNA was extracted from the whole blood of Patient 2 using known procedures. The extracted sample DNA was then PCR amplified. In the present example, the 374 target genes were amplified and analyzed.

[0040] Following amplification, the amplicons were purified. A library was then made with the purified amplicons. The library was amplified and sequenced. After sequencing, the sequence of the amplicons from the sample were compared to a normal, control reference sequence comprising the hg38 sequence.

[0041] A common polymorphism, c.12627T>G, p.Pro4210Pro, was detected in the PKD1 gene from Patient 2. This polymorphism is present in about 20% of the general population. The polymorphism was detected in 48% of the total reads, indicating this donor is heterozygous for this variant. This polymorphism does not correlate with CKD.

[0042] Although the present invention has been discussed in considerable detail with reference to certain preferred embodiments, other embodiments are possible. Therefore, the scope of the appended claim should not be limited to the description of preferred embodiments contained in this disclosure. All references cited herein are incorporated by reference in their entirety.

What is claimed is:

1. A method for determining a subject's PGX profile and risk for developing CKD, the method comprising the steps of:
(a) obtaining a sample of genetic material from the subject;
(b) amplifying the genetic material using two or more primers specific for the 334 genes underlying CKD and 40 genes underlying PGX;
(c) determining the DNA sequence of the amplified genetic material of step (b); and
(d) comparing the DNA sequence of the amplified genetic material with a DNA sequence from a human reference genome;
(e) wherein one or more DNA sequence alterations in the amplified genetic material indicates the subject's PGX profile and that the subject has a risk for developing CKD.

2. The method of claim 1, wherein the DNA sequence alteration is a variant.

3. The method of claim 1, wherein the DNA sequence alteration is a mutation.

4. The method of claim 1, wherein the DNA sequence alteration is a polymorphism.

5. The method of claim 1, wherein the step of amplification of the sample of genetic material comprises amplification of 374 total genes.

6. The method of claim 1, wherein the genes underlying CKD and PGX comprise the gene lists from Table 1 and Table 2.

7. The method of claim 1, wherein the subject's risk for developing CKD and their PGX profile are determined within 48 hours of receipt of the sample from the subject.

8. The method of claim 1, wherein the subject's risk for developing CKD and their PGX profile are determined within 5 days of receipt of the sample of from the subject.

9. A method for diagnosing CKD and determining the PGX profile of a subject, the method comprising the steps of:
(a) obtaining a sample of genetic material from the subject;
(b) amplifying the genetic material using primers specific for the genes underlying CKD and PGX;
(c) determining the DNA sequence of the amplified genetic material of step (b); and
(d) comparing the DNA sequence of the amplified genetic material with a DNA sequence from the human reference genome sequence;
(e) wherein one or more DNA sequence alterations in the amplified genetic material not present in the DNA sequence from the human reference genome sequence determines the PGX profile of the subject and may indicate that the subject has CKD.

10. The method of claim 9, wherein the DNA sequence alteration is a variant.

11. The method of claim 9, wherein the DNA sequence alteration is a mutation.

12. The method of claim 9, wherein the DNA sequence alteration is a polymorphism.

13. The method of claim 9, wherein the step of amplification of the sample of genetic material comprises amplification of 374 genes.

14. The method of claim 9, wherein the genes underlying CKD and PGX comprise the gene lists from Table 1 and Table 2.

15. The method of claim 9, wherein the genetic results are determined within 48 hours of receipt of the sample of from the subject.

16. The method of claim 9, wherein the genetic results are determined within 5 days of receipt of the sample of from the subject.

17. A method for determining a subject's risk for being a genetic carrier for CKD or PGX haplotypes, the method comprising the steps of:
(a) obtaining a sample of genetic material from the subject;
(b) amplifying the genetic material using primers specific for the genes underlying CKD and PGX;
(c) determining the DNA sequence of the amplified genetic material of step (b); and
(d) comparing the DNA sequence of the amplified genetic material with a DNA sequence from the human reference genome sequence;
(e) wherein one or more DNA sequence alterations in the amplified genetic material not present in the human reference genome sequence determines the subject's PGX profile and may indicate that the subject is a genetic carrier for CKD.

18. The method of claim 17, wherein the DNA sequence alteration is a variant.

19. The method of claim 17, wherein the DNA sequence alteration is a mutation.

20. The method of claim 17, wherein the DNA sequence alteration is a polymorphism.

The application's sequence listing, which the Patent Office published only in electronic form, follows.

SEQUENCE LISTING (20284 sequences)

SEQ ID NO: 1 - DNA, 15 bp, synthetic construct
  source 1..15: mol_type = other DNA
gagatggtgtagaat

SEQ ID NO: 2 - DNA, 15 bp, synthetic construct
  source 1..15: mol_type = other DNA
tgcccctcctaatgc

SEQ ID NO: 3 - DNA, 15 bp, synthetic construct
  source 1..15: mol_type = other DNA
tggagggatgcagac

SEQ ID NO: 4 - DNA, 15 bp, synthetic construct
  source 1..15: mol_type = other DNA
cagcttacacagcga

SEQ ID NO: 5 - DNA, 15 bp, synthetic construct
  source 1..15: mol_type = other DNA
tcatgtactgtactc

SEQ ID NO: 6 - DNA, 15 bp, synthetic construct
  source 1..15: mol_type = other DNA
tgtcgcctgtcattc

SEQ ID NO: 7 - DNA, 15 bp, synthetic construct
  source 1..15: mol_type = other DNA
caagcccttgcacag

SEQ ID NO: 8 - DNA, 15 bp, synthetic construct
  source 1..15: mol_type = other DNA
ttgctctgtatttcg

SEQ ID NO: 9 - DNA, 15 bp, synthetic construct
  source 1..15: mol_type = other DNA
tgaaaatactaagac

SEQ ID NO: 10 - DNA, 15 bp, synthetic construct
  source 1..15: mol_type = other DNA
tggaactagatcctt

SEQ ID NO: 11 - DNA, 15 bp, synthetic construct
  source 1..15: mol_type = other DNA
gaagggccaactagg

SEQ ID NO: 12 - DNA, 15 bp, synthetic construct
  source 1..15: mol_type = other DNA
gctcacatcaaactg

SEQ ID NO: 13 - DNA, 15 bp, synthetic construct
  source 1..15: mol_type = other DNA
gacatgcatttacac

SEQ ID NO: 14 - DNA, 15 bp, synthetic construct
  source 1..15: mol_type = other DNA
ctaaaacaaaaccca

SEQ ID NO: 15 - DNA, 15 bp, synthetic construct
  source 1..15: mol_type = other DNA
tgaaagacgtgttaa

SEQ ID NO: 16 - DNA, 15 bp, synthetic construct
  source 1..15: mol_type = other DNA
aatttgtctcccagt

SEQ ID NO: 17 - DNA, 15 bp, synthetic construct
  source 1..15: mol_type = other DNA
aacacaggatgacat

SEQ ID NO: 18 - DNA, 15 bp, synthetic construct
  source 1..15: mol_type = other DNA
ttagttttcagtgag

SEQ ID NO: 19 - DNA, 15 bp, synthetic construct
  source 1..15: mol_type = other DNA
tcgaaccgccgtctc

SEQ ID NO: 20 - DNA, 15 bp, synthetic construct
  source 1..15: mol_type = other DNA
aacaagcgtgatgaa

SEQ ID NO: 21 - DNA, 15 bp, synthetic construct
  source 1..15: mol_type = other DNA
aatcactgcctcagt

SEQ ID NO: 22 - DNA, 15 bp, synthetic construct
  source 1..15: mol_type = other DNA
tattccatcctacct

SEQ ID NO: 23 - DNA, 15 bp, synthetic construct
  source 1..15: mol_type = other DNA
tgtcaatggtgaagc

SEQ ID NO: 24 - DNA, 15 bp, synthetic construct
  source 1..15: mol_type = other DNA
agtttaagatcatgc

SEQ ID NO: 25 - DNA, 15 bp, synthetic construct
  source 1..15: mol_type = other DNA
gaatatgtttatcat

SEQ ID NO: 26 - DNA, 15 bp, synthetic construct
  source 1..15: mol_type = other DNA
aactcatccgtgttc

SEQ ID NO: 27 - DNA, 15 bp, synthetic construct
  source 1..15: mol_type = other DNA
gtgaccacgtcaatg

SEQ ID NO: 28 - DNA, 15 bp, synthetic construct
  source 1..15: mol_type = other DNA
acgtggtcctaccga

SEQ ID NO: 29 - DNA, 15 bp, synthetic construct
  source 1..15: mol_type = other DNA
ttatggctcttctaa

SEQ ID NO: 30 - DNA, 15 bp, synthetic construct
  source 1..15: mol_type = other DNA
agttgtgtagtgttg

SEQ ID NO: 31 - DNA, 15 bp, synthetic construct
  source 1..15: mol_type = other DNA
gccaccccgtttttt

SEQ ID NO: 32 - DNA, 15 bp, synthetic construct
  source 1..15: mol_type = other DNA
cccagcactttcctc

SEQ ID NO: 33 - DNA, 15 bp, synthetic construct
  source 1..15: mol_type = other DNA
gccaatctgaaacag

SEQ ID NO: 34 - DNA, 15 bp, synthetic construct
  source 1..15: mol_type = other DNA
gcgaagaccttttga

SEQ ID NO: 35 - DNA, 15 bp, synthetic construct
  source 1..15: mol_type = other DNA
ttcttccagttgtgg

SEQ ID NO: 36 - DNA, 15 bp, synthetic construct
  source 1..15: mol_type = other DNA
tgtggaagtttctct

SEQ ID NO: 37 - DNA, 15 bp, synthetic construct
  source 1..15: mol_type = other DNA
ctgttctcctaggct

SEQ ID NO: 38 - DNA, 15 bp, synthetic construct
  source 1..15: mol_type = other DNA
atgtgagttgatcca

SEQ ID NO: 39 - DNA, 15 bp, synthetic construct
  source 1..15: mol_type = other DNA
tattttgctgagatc

SEQ ID NO: 40 - DNA, 15 bp, synthetic construct
  source 1..15: mol_type = other DNA
ccagaagttgcacag

SEQ ID NO: 41 - DNA, 15 bp, synthetic construct
  source 1..15: mol_type = other DNA
ttttgcaaatcagca

SEQ ID NO: 42 - DNA, 15 bp, synthetic construct
  source 1..15: mol_type = other DNA
caaccgtgcatcttc

SEQ ID NO: 43 - DNA, 15 bp, synthetic construct
  source 1..15: mol_type = other DNA
gtccagaatcctttg

SEQ ID NO: 44 - DNA, 15 bp, synthetic construct
  source 1..15: mol_type = other DNA
acagctttatatgaa

SEQ ID NO: 45 - DNA, 15 bp, synthetic construct
  source 1..15: mol_type = other DNA
atgactccctcccat

SEQ ID NO: 46 - DNA, 15 bp, synthetic construct
  source 1..15: mol_type = other DNA
aaataaaagggttaa

SEQ ID NO: 47 - DNA, 15 bp, synthetic construct
  source 1..15: mol_type = other DNA
atcccacaaagaagg

SEQ ID NO: 48 - DNA, 15 bp, synthetic construct
  source 1..15: mol_type = other DNA
gtagggagcagtttt

SEQ ID NO: 49 - DNA, 15 bp, synthetic construct
  source 1..15: mol_type = other DNA
ggtagaattagccta

SEQ ID NO: 50 - DNA, 15 bp, synthetic construct
  source 1..15: mol_type = other DNA
gccagtttccacaag

SEQ ID NO: 51 - DNA, 15 bp, synthetic construct
  source 1..15: mol_type = other DNA
tcaggcaagctttca

SEQ ID NO: 52 - DNA, 15 bp, synthetic construct
  source 1..15: mol_type = other DNA
agactgttctgttca

SEQ ID NO: 53 - DNA, 15 bp, synthetic construct
  source 1..15: mol_type = other DNA
gtgatagtaaaatct

SEQ ID NO: 54 - DNA, 15 bp, synthetic construct
  source 1..15: mol_type = other DNA
ttataaacagcccaa

SEQ ID NO: 55 - DNA, 15 bp, synthetic construct
  source 1..15: mol_type = other DNA
tgcaggtactacaaa

SEQ ID NO: 56 - DNA, 15 bp, synthetic construct
  source 1..15: mol_type = other DNA
ggagatcctgatcta

SEQ ID NO: 57 - DNA, 15 bp, synthetic construct
  source 1..15: mol_type = other DNA
gaccttcacgcaaaa

SEQ ID NO: 58 - DNA, 15 bp, synthetic construct
  source 1..15: mol_type = other DNA
aataaacacgaccat

SEQ ID NO: 59 - DNA, 15 bp, synthetic construct
  source 1..15: mol_type = other DNA
actgctggtgatttg

SEQ ID NO: 60 - DNA, 15 bp, synthetic construct
  source 1..15: mol_type = other DNA
ttgagatcatgttgg

SEQ ID NO: 61 - DNA, 15 bp, synthetic construct
  source 1..15: mol_type = other DNA
ggtgatcctcttgtt

SEQ ID NO: 62 - DNA, 15 bp, synthetic construct
  source 1..15: mol_type = other DNA
gcgtctgtcttatct

SEQ ID NO: 63 - DNA, 15 bp, synthetic construct
  source 1..15: mol_type = other DNA
cagaacactgtatcc

SEQ ID NO: 64 - DNA, 15 bp, synthetic construct
  source 1..15: mol_type = other DNA
tctcaacctggtgga

SEQ ID NO: 65 - DNA, 15 bp, synthetic construct
  source 1..15: mol_type = other DNA
catacagaccttgga

SEQ ID NO: 66 - DNA, 15 bp, synthetic construct
  source 1..15: mol_type = other DNA
tgcacatcctgagag

SEQ ID NO: 67 - DNA, 15 bp, synthetic construct
  source 1..15: mol_type = other DNA
ggcacatctaacgaa

SEQ ID NO: 68 - DNA, 15 bp, synthetic construct
  source 1..15: mol_type = other DNA
agtgaggaaagtgag

SEQ ID NO: 69 - DNA, 15 bp, synthetic construct
  source 1..15: mol_type = other DNA
agaggccgtaccttc

SEQ ID NO: 70 - DNA, 15 bp, synthetic construct
  source 1..15: mol_type = other DNA
cttgttggcctctcg

SEQ ID NO: 71 - DNA, 15 bp, synthetic construct
  source 1..15: mol_type = other DNA
cccaattttaggaag

SEQ ID NO: 72 - DNA, 15 bp, synthetic construct
  source 1..15: mol_type = other DNA
tgaaggtggccagtg

SEQ ID NO: 73 - DNA, 15 bp, synthetic construct
  source 1..15: mol_type = other DNA
cacttacgagtaaat

SEQ ID NO: 74 - DNA, 15 bp, synthetic construct
  source 1..15: mol_type = other DNA
cagtgaacagaatag

SEQ ID NO: 75 - DNA, 15 bp, synthetic construct
  source 1..15: mol_type = other DNA
ggatcccaggatacc

SEQ ID NO: 76 - DNA, 15 bp, synthetic construct
  source 1..15: mol_type = other DNA
agtgtgtaatgtgtg

SEQ ID NO: 77 - DNA, 15 bp, synthetic construct
  source 1..15: mol_type = other DNA
caacaggtgagcctg

SEQ ID NO: 78 - DNA, 15 bp, synthetic construct
  source 1..15: mol_type = other DNA
tcttgttccgagcga

SEQ ID NO: 79 - DNA, 15 bp, synthetic construct
  source 1..15: mol_type = other DNA
agctccgggtgatag

SEQ ID NO: 80 - DNA, 15 bp, synthetic construct
  source 1..15: mol_type = other DNA
gatacgtgtgctgtc

SEQ ID NO: 81 - DNA, 15 bp, synthetic construct
  source 1..15: mol_type = other DNA
tttgtcctccgttgc

SEQ ID NO: 82 - DNA, 15 bp, synthetic construct
  source 1..15: mol_type = other DNA
tgttgcttcctgacc

SEQ ID NO: 83 - DNA, 15 bp, synthetic construct
  source 1..15: mol_type = other DNA
gaagcattctcaatt

SEQ ID NO: 84 - DNA, 15 bp, synthetic construct
  source 1..15: mol_type = other DNA
ggacagtcaggagtg

SEQ ID NO: 85 - DNA, 15 bp, synthetic construct
  source 1..15: mol_type = other DNA
tggaacttgaagggg

SEQ ID NO: 86 - DNA, 15 bp, synthetic construct
  source 1..15: mol_type = other DNA
tctctcccactcctc

SEQ ID NO: 87 - DNA, 15 bp, synthetic construct
  source 1..15: mol_type = other DNA
ttcgagccagctcag

SEQ ID NO: 88 - DNA, 15 bp, synthetic construct
  source 1..15: mol_type = other DNA
gtcatcgccgcctac

SEQ ID NO: 89 - DNA, 15 bp, synthetic construct
  source 1..15: mol_type = other DNA
actcaaagaactcgg

SEQ ID NO: 90 - DNA, 15 bp, synthetic construct
  source 1..15: mol_type = other DNA
ctcttctgagatcgc

SEQ ID NO: 91 - DNA, 15 bp, synthetic construct
  source 1..15: mol_type = other DNA
acagctgaacaaacc

SEQ ID NO: 92 - DNA, 15 bp, synthetic construct
  source 1..15: mol_type = other DNA
gactcgcgctctgac

SEQ ID NO: 93 - DNA, 15 bp, synthetic construct
  source 1..15: mol_type = other DNA
cgccattcatgaccc

SEQ ID NO: 94 - DNA, 15 bp, synthetic construct
  source 1..15: mol_type = other DNA
gggtcatctcaaacg

SEQ ID NO: 95 - DNA, 15 bp, synthetic construct
  source 1..15: mol_type = other DNA
aaactcacgccttga

SEQ ID NO: 96 - DNA, 15 bp, synthetic construct
  source 1..15: mol_type = other DNA
cagggtgtagatagg

SEQ ID NO: 97 - DNA, 15 bp, synthetic construct
  source 1..15: mol_type = other DNA
ctcccggtttcctcc

SEQ ID NO: 98 - DNA, 15 bp, synthetic construct
  source 1..15: mol_type = other DNA
gtggcaactgaatac

SEQ ID NO: 99 - DNA, 15 bp, synthetic construct
  source 1..15: mol_type = other DNA
ttacccacgttggcc

SEQ ID NO: 100 - DNA, 15 bp, synthetic construct
  source 1..15: mol_type = other DNA
gaacgcgcttttctc

SEQ ID NO: 101 - DNA, 15 bp, synthetic construct
  source 1..15: mol_type = other DNA
actcgtcccatgagg

SEQ ID NO: 102 - DNA, 15 bp, synthetic construct
  source 1..15: mol_type = other DNA
cttttggcctccttt

SEQ ID NO: 103 - DNA, 15 bp, synthetic construct
  source 1..15: mol_type = other DNA
tgtcttgcctttgcc

SEQ ID NO: 104 - DNA, 15 bp, synthetic construct
  source 1..15: mol_type = other DNA
tcagttaacccagag

SEQ ID NO: 105 - DNA, 15 bp, synthetic construct
  source 1..15: mol_type = other DNA
atggcactcccgaat

SEQ ID NO: 106 - DNA, 15 bp, synthetic construct
  source 1..15: mol_type = other DNA
gatgccaataaacag

SEQ ID NO: 107 - DNA, 15 bp, synthetic construct
  source 1..15: mol_type = other DNA
gacaatctgattctt

SEQ ID NO: 108 - DNA, 15 bp, synthetic construct
  source 1..15: mol_type = other DNA
gactgttggaccttg

SEQ ID NO: 109 - DNA, 15 bp, synthetic construct
  source 1..15: mol_type = other DNA
ccaacagtctgacgg

SEQ ID NO: 110 - DNA, 15 bp, synthetic construct
  source 1..15: mol_type = other DNA
ccctcgttttgttca

SEQ ID NO: 111 - DNA, 15 bp, synthetic construct
  source 1..15: mol_type = other DNA
taactgttcggcaat

SEQ ID NO: 112 - DNA, 15 bp, synthetic construct
  source 1..15: mol_type = other DNA
tatttgctagagctg

SEQ ID NO: 113 - DNA, 15 bp, synthetic construct
  source 1..15: mol_type = other DNA
cctaactaaggacag

SEQ ID NO: 114 - DNA, 15 bp, synthetic construct
  source 1..15: mol_type = other DNA
tttgtggacggactg

SEQ ID NO: 115 - DNA, 15 bp, synthetic construct
  source 1..15: mol_type = other DNA
ttcttgcaagtaatt

SEQ ID NO: 116 - DNA, 15 bp, synthetic construct
  source 1..15: mol_type = other DNA
tacagacaaggtggt

SEQ ID NO: 117 - DNA, 15 bp, synthetic construct
  source 1..15: mol_type = other DNA
tttccccgggaagag

SEQ ID NO: 118 - DNA, 15 bp, synthetic construct
  source 1..15: mol_type = other DNA
ggcgtgctgatgaag

SEQ ID NO: 119 - DNA, 15 bp, synthetic construct
  source 1..15: mol_type = other DNA
agctcaccggagatg

SEQ ID NO: 120 - DNA, 15 bp, synthetic construct
  source 1..15: mol_type = other DNA
tcatacaccgatgtg

SEQ ID NO: 121 - DNA, 15 bp, synthetic construct
  source 1..15: mol_type = other DNA
ttaatggaaaaagca

SEQ ID NO: 122 - DNA, 15 bp, synthetic construct
  source 1..15: mol_type = other DNA
tgtgtccctggtttg

SEQ ID NO: 123 - DNA, 15 bp, synthetic construct
  source 1..15: mol_type = other DNA
aatgggcacaacttc

SEQ ID NO: 124 - DNA, 15 bp, synthetic construct
  source 1..15: mol_type = other DNA
atggtctgggcttcg

SEQ ID NO: 125 - DNA, 15 bp, synthetic construct
  source 1..15: mol_type = other DNA
caccagtacaacgac

SEQ ID NO: 126 - DNA, 15 bp, synthetic construct
  source 1..15: mol_type = other DNA
cactcatcttgacta

SEQ ID NO: 127 - DNA, 15 bp, synthetic construct
  source 1..15: mol_type = other DNA
ccttagggccacagg

SEQ ID NO: 128 - DNA, 15 bp, synthetic construct
  source 1..15: mol_type = other DNA
gaagtttgaggaaga

SEQ ID NO: 129 - DNA, 15 bp, synthetic construct
  source 1..15: mol_type = other DNA
ttctgactccacacc

SEQ ID NO: 130 - DNA, 15 bp, synthetic construct
  source 1..15: mol_type = other DNA
ttcccaaggatgacc

SEQ ID NO: 131 - DNA, 15 bp, synthetic construct
  source 1..15: mol_type = other DNA
aagtggagagaatca

SEQ ID NO: 132 - DNA, 15 bp, synthetic construct
  source 1..15: mol_type = other DNA
aattggctggtttga

SEQ ID NO: 133 - DNA, 15 bp, synthetic construct
  source 1..15: mol_type = other DNA
ccattcagagctaaa

SEQ ID NO: 134 - DNA, 15 bp, synthetic construct
  source 1..15: mol_type = other DNA
agtttagaaagctct

SEQ ID NO: 135 - DNA, 15 bp, synthetic construct
  source 1..15: mol_type = other DNA
cccagggttgtagaa

SEQ ID NO: 136 - DNA, 15 bp, synthetic construct
  source 1..15: mol_type = other DNA
gtgtgtgtcctgaac

SEQ ID NO: 137 - DNA, 15 bp, synthetic construct
  source 1..15: mol_type = other DNA
aacaaagcgcttgcc

SEQ ID NO: 138 - DNA, 15 bp, synthetic construct
  source 1..15: mol_type = other DNA
tgatgtcacctaccg

SEQ ID NO: 139 - DNA, 15 bp, synthetic construct
  source 1..15: mol_type = other DNA
attaaagacgatcct

SEQ ID NO: 140 - DNA, 15 bp, synthetic construct
  source 1..15: mol_type = other DNA
cttgagggtcaattc

SEQ ID NO: 141 - DNA, 15 bp, synthetic construct
  source 1..15: mol_type = other DNA
tggaagcctcatgtc

SEQ ID NO: 142 - DNA, 15 bp, synthetic construct
  source 1..15: mol_type = other DNA
tgaatacgactggca

SEQ ID NO: 143 - DNA, 15 bp, synthetic construct
  source 1..15: mol_type = other DNA
ttgtgaccattccgg

SEQ ID NO: 144 - DNA, 15 bp, synthetic construct
  source 1..15: mol_type = other DNA
tacctcttctacctg

SEQ ID NO: 145 - DNA, 15 bp, synthetic construct
  source 1..15: mol_type = other DNA
ggaagaatgtgtcag

SEQ ID NO: 146 - DNA, 15 bp, synthetic construct
  source 1..15: mol_type = other DNA
tgtcatccctattgg

SEQ ID NO: 147 - DNA, 15 bp, synthetic construct
  source 1..15: mol_type = other DNA
tcctcttcatttggg

SEQ ID NO: 148 - DNA, 15 bp, synthetic construct
  source 1..15: mol_type = other DNA
ggaatgatgtcctga

SEQ ID NO: 149 - DNA, 15 bp, synthetic construct
  source 1..15: mol_type = other DNA
ccagactcaactacc

SEQ ID NO: 150 - DNA, 15 bp, synthetic construct
  source 1..15: mol_type = other DNA
aggaagtaccagtct

SEQ ID NO: 151 - DNA, 15 bp, synthetic construct
  source 1..15: mol_type = other DNA
aagcagaaggtgttc

SEQ ID NO: 152 - DNA, 15 bp, synthetic construct
  source 1..15: mol_type = other DNA
gcaaatcaggagtag

SEQ ID NO: 153 - DNA, 15 bp, synthetic construct
  source 1..15: mol_type = other DNA
gtgggcaccacagtg

SEQ ID NO: 154 - DNA, 15 bp, synthetic construct
  source 1..15: mol_type = other DNA
cctgggatctgagaa

SEQ ID NO: 155 - DNA, 15 bp, synthetic construct
  source 1..15: mol_type = other DNA
gttttaatctagaga

SEQ ID NO: 156 - DNA, 15 bp, synthetic construct
  source 1..15: mol_type = other DNA
accataccactttgc

SEQ ID NO: 157 - DNA, 15 bp, synthetic construct
  source 1..15: mol_type = other DNA
aggactacctggata

SEQ ID NO: 158 - DNA, 15 bp, synthetic construct
  source 1..15: mol_type = other DNA
cttttgtcacactgg

SEQ ID NO: 159 - DNA, 15 bp, synthetic construct
  source 1..15: mol_type = other DNA
gtccccagtgtgaca

SEQ ID NO: 160 - DNA, 15 bp, synthetic construct
  source 1..15: mol_type = other DNA
ccactcccatttctc

SEQ ID NO: 161 - DNA, 15 bp, synthetic construct
  source 1..15: mol_type = other DNA
ttggagaaatgggag

SEQ ID NO: 162 - DNA, 15 bp, synthetic construct
  source 1..15: mol_type = other DNA
aagaatgagccccat

SEQ ID NO: 163 - DNA, 15 bp, synthetic construct
  source 1..15: mol_type = other DNA
tgacatcagtgtcgc

SEQ ID NO: 164 - DNA, 15 bp, synthetic construct
  source 1..15: mol_type = other DNA
gcaagagatgtacac

SEQ ID NO: 165 - DNA, 15 bp, synthetic construct
  source 1..15: mol_type = other DNA
ttggctccccactgc

SEQ ID NO: 166 - DNA, 15 bp, synthetic construct
  source 1..15: mol_type = other DNA
gaagaggtaagcaca

SEQ ID NO: 167 - DNA, 15 bp, synthetic construct
  source 1..15: mol_type = other DNA
ttggctccccactgc

SEQ ID NO: 168 - DNA, 15 bp, synthetic construct
  source 1..15: mol_type = other DNA
gaagaggtaagcaca

SEQ ID NO: 169 - DNA, 15 bp, synthetic construct
  source 1..15: mol_type = other DNA
ttacctcccttcacc

SEQ ID NO: 170 - DNA, 15 bp, synthetic construct
  source 1..15: mol_type = other DNA
tgctccacgggctag

SEQ ID NO: 171 - DNA, 15 bp, synthetic construct
  source 1..15: mol_type = other DNA
ggatgtaggaaaggg

SEQ ID NO: 172 - DNA, 15 bp, synthetic construct
  source 1..15: mol_type = other DNA
ctgcagaatgatgcc

SEQ ID NO: 173 - DNA, 15 bp, synthetic construct
  source 1..15: mol_type = other DNA
tcacgtaataccctc

SEQ ID NO: 174 - DNA, 15 bp, synthetic construct
  source 1..15: mol_type = other DNA
cccaggagtggttgt

SEQ ID NO: 175 - DNA, 15 bp, synthetic construct
  source 1..15: mol_type = other DNA
ccacagctgtccatg

SEQ ID NO: 176 - DNA, 15 bp, synthetic construct
  source 1..15: mol_type = other DNA
atgccaccaggtgca

SEQ ID NO: 177 - DNA, 15 bp, synthetic construct
  source 1..15: mol_type = other DNA
tctcttgtccacacc

SEQ ID NO: 178 - DNA, 15 bp, synthetic construct
  source 1..15: mol_type = other DNA
tgaggaccatcctta

SEQ ID NO: 179 - DNA, 15 bp, synthetic construct
  source 1..15: mol_type = other DNA
cttggtgagtctggg

SEQ ID NO: 180 - DNA, 15 bp, synthetic construct
  source 1..15: mol_type = other DNA
gggcatgatgggatt

SEQ ID NO: 181 - DNA, 15 bp, synthetic construct
  source 1..15: mol_type = other DNA
ctgagggcattgtga

SEQ ID NO: 182 - DNA, 15 bp, synthetic construct
  source 1..15: mol_type = other DNA
cacgaggaagtgatg

SEQ ID NO: 183 - DNA, 15 bp, synthetic construct
  source 1..15: mol_type = other DNA
tagttattccctcac

SEQ ID NO: 184 - DNA, 15 bp, synthetic construct
  source 1..15: mol_type = other DNA
cttcttgacaatgat

SEQ ID NO: 185 - DNA, 15 bp, synthetic construct
  source 1..15: mol_type = other DNA
tgaccggccagatag

SEQ ID NO: 186 - DNA, 15 bp, synthetic construct
  source 1..15: mol_type = other DNA
tttctttttggaggt

SEQ ID NO: 187 - DNA, 15 bp, synthetic construct
  source 1..15: mol_type = other DNA
gacatccccgactcc

SEQ ID NO: 188 - DNA, 15 bp, synthetic construct
  source 1..15: mol_type = other DNA
tactcggtcacgtct

SEQ ID NO: 189 - DNA, 15 bp, synthetic construct
  source 1..15: mol_type = other DNA
agggtggagcacttc

SEQ ID NO: 190 - DNA, 15 bp, synthetic construct
  source 1..15: mol_type = other DNA
gtgaagtgacttgct

SEQ ID NO: 191 - DNA, 15 bp, synthetic construct
  source 1..15: mol_type = other DNA
accaaggtcttccgg

SEQ ID NO: 192 - DNA, 15 bp, synthetic construct
  source 1..15: mol_type = other DNA
ctccctcaggagatc

SEQ ID NO: 193 - DNA, 15 bp, synthetic construct
  source 1..15: mol_type = other DNA
accaggtggttactc

SEQ ID NO: 194 - DNA, 15 bp, synthetic construct
  source 1..15: mol_type = other DNA
cacactccccaatac

SEQ ID NO: 195 - DNA, 15 bp, synthetic construct
  source 1..15: mol_type = other DNA
gtgtttcctaacaat

SEQ ID NO: 196 - DNA, 15 bp, synthetic construct
  source 1..15: mol_type = other DNA
gggactcataagtat

SEQ ID NO: 197 - DNA, 15 bp, synthetic construct
  source 1..15: mol_type = other DNA
cagcctggaaatgaa

SEQ ID NO: 198 - DNA, 15 bp, synthetic construct
  source 1..15: mol_type = other DNA
tggagctgggctgga

SEQ ID NO: 199 - DNA, 15 bp, synthetic construct
  source 1..15: mol_type = other DNA
tcctcttcatgggtg

SEQ ID NO: 200 - DNA, 15 bp, synthetic construct
  source 1..15: mol_type = other DNA
gtcctgagtggtcct

SEQ ID NO: 201 - DNA, 15 bp, synthetic construct
  source 1..15: mol_type = other DNA
ccaaggatgggactg

SEQ ID NO: 202 - DNA, 15 bp, synthetic construct
  source 1..15: mol_type = other DNA
acatccacctggcat

SEQ ID NO: 203 - DNA, 15 bp, synthetic construct
  source 1..15: mol_type = other DNA
gcctccctgataccc

SEQ ID NO: 204 - DNA, 15 bp, synthetic construct
  source 1..15: mol_type = other DNA
ctcttcctgggcctt

SEQ ID NO: 205 - DNA, 15 bp, synthetic construct
  source 1..15: mol_type = other DNA
tcttgtccccaaagg

SEQ ID NO: 206 - DNA, 15 bp, synthetic construct
  source 1..15: mol_type = other DNA
cccaaagttcttgat

SEQ ID NO: 207 - DNA, 15 bp, synthetic construct
  source 1..15: mol_type = other DNA
gtcttggaggactac

SEQ ID NO: 208 - DNA, 15 bp, synthetic construct
  source 1..15: mol_type = other DNA
ccccaagactgagtt

SEQ ID NO: 209 - DNA, 15 bp, synthetic construct
  source 1..15: mol_type = other DNA
aagccgtgctgactc

SEQ ID NO: 210 - DNA, 15 bp, synthetic construct
  source 1..15: mol_type = other DNA
tgccaccagcatttc

SEQ ID NO: 211 - DNA, 15 bp, synthetic construct
  source 1..15: mol_type = other DNA
aagccgtgctgactc

SEQ ID NO: 212 - DNA, 15 bp, synthetic construct
  source 1..15: mol_type = other DNA
tgccaccagcatttc

SEQ ID NO: 213 - DNA, 15 bp, synthetic construct
  source 1..15: mol_type = other DNA
gtgcgcaccacgacc

SEQ ID NO: 214 - DNA, 15 bp, synthetic construct
  source 1..15: mol_type = other DNA
tcagctgggccgaag

SEQ ID NO: 215 - DNA, 15 bp, synthetic construct
  source 1..15: mol_type = other DNA
gtgcgcaccacgacc

SEQ ID NO: 216 - DNA, 15 bp, synthetic construct
  source 1..15: mol_type = other DNA
tcagctgggccgaag

SEQ ID NO: 217 - DNA, 15 bp, synthetic construct
  source 1..15: mol_type = other DNA
ccacgtatgaccctg

SEQ ID NO: 218 - DNA, 15 bp, synthetic construct
  source 1..15: mol_type = other DNA
ctgtgactgtaggac

SEQ ID NO: 219 - DNA, 15 bp, synthetic construct
  source 1..15: mol_type = other DNA
ggacagatgggtcag

SEQ ID NO: 220 - DNA, 15 bp, synthetic construct
  source 1..15: mol_type = other DNA
tcgctgttgaagacc

SEQ ID NO: 221 - DNA, 15 bp, synthetic construct
  source 1..15: mol_type = other DNA
ctgtctgggattact

SEQ ID NO: 222 - DNA, 15 bp, synthetic construct
  source 1..15: mol_type = other DNA
ctcaacacaggtcag

SEQ ID NO: 223 - DNA, 15 bp, synthetic construct
  source 1..15: mol_type = other DNA
gtgggagcgccatct

SEQ ID NO: 224 - DNA, 15 bp, synthetic construct
  source 1..15: mol_type = other DNA
aagcgctgcccagga

SEQ ID NO: 225 - DNA, 15 bp, synthetic construct
  source 1..15: mol_type = other DNA
gtgggagcgccatct

SEQ ID NO: 226 - DNA, 15 bp, synthetic construct
  source 1..15: mol_type = other DNA
aagcgctgcccagga

SEQ ID NO: 227 - DNA, 15 bp, synthetic construct
  source 1..15: mol_type = other DNA
gctcatgtctccatg

SEQ ID NO: 228 - DNA, 15 bp, synthetic construct
  source 1..15: mol_type = other DNA
ctacataaggttggg

SEQ ID NO: 229 - DNA, 15 bp, synthetic construct
  source 1..15: mol_type = other DNA
acccaggagtgtggg

SEQ ID NO: 230 - DNA, 15 bp, synthetic construct
  source 1..15: mol_type = other DNA
ttacccgagaagcta

SEQ ID NO: 231 - DNA, 15 bp, synthetic construct
  source 1..15: mol_type = other DNA
caccttggttctcgc

SEQ ID NO: 232 - DNA, 15 bp, synthetic construct
  source 1..15: mol_type = other DNA
cctcccgaagctgta

SEQ ID NO: 233 - DNA, 15 bp, synthetic construct
  source 1..15: mol_type = other DNA
cgggaggtcagagcc

SEQ ID NO: 234 - DNA, 15 bp, synthetic construct
  source 1..15: mol_type = other DNA
gcgggtggtaccatt

SEQ ID NO: 235 - DNA, 15 bp, synthetic construct
  source 1..15: mol_type = other DNA
catctggactcgctg

SEQ ID NO: 236 - DNA, 15 bp, synthetic construct
  source 1..15: mol_type = other DNA
atgtgggtggaaggc

SEQ ID NO: 237 - DNA, 15 bp, synthetic construct
  source 1..15: mol_type = other DNA
ggacactcccctgtc

SEQ ID NO: 238 - DNA, 15 bp, synthetic construct
  source 1..15: mol_type = other DNA
ccgtcctcagtacaa

SEQ ID NO: 239 - DNA, 15 bp, synthetic construct
  source 1..15: mol_type = other DNA
aggttgtactgagga

SEQ ID NO: 240 - DNA, 15 bp, synthetic construct
  source 1..15: mol_type = other DNA
cagccaattctccag

SEQ ID NO: 241 - DNA, 15 bp, synthetic construct
  source 1..15: mol_type = other DNA
gccctaacatgaggc

SEQ ID NO: 242 - DNA, 15 bp, synthetic construct
  source 1..15: mol_type = other DNA
gttgcggcccagaat

SEQ ID NO: 243 - DNA, 15 bp, synthetic construct
  source 1..15: mol_type = other DNA
ccacaccatctccac

SEQ ID NO: 244 - DNA, 15 bp, synthetic construct
  source 1..15: mol_type = other DNA
tttcgaggtgccctt

SEQ ID NO: 245 - DNA, 15 bp, synthetic construct
  source 1..15: mol_type = other DNA
caaagctccccacag

SEQ ID NO: 246 - DNA, 15 bp, synthetic construct
  source 1..15: mol_type = other DNA
tcctcctcccttccg

SEQ ID NO: 247 - DNA, 15 bp, synthetic construct
  source 1..15: mol_type = other DNA
gttcttggctaagta

SEQ ID NO: 248 - DNA, 15 bp, synthetic construct
  source 1..15: mol_type = other DNA
cctcaggatatcagc

SEQ ID NO: 249 - DNA, 15 bp, synthetic construct
  source 1..15: mol_type = other DNA
cctgagggagaggtg

SEQ ID NO: 250 - DNA, 15 bp, synthetic construct
  source 1..15: mol_type = other DNA
cctcatcagctcttc

SEQ ID NO: 251 - DNA, 15 bp, synthetic construct
  source 1..15: mol_type = other DNA
gtgtttcctaacatc

SEQ ID NO: 252 - DNA, 15 bp, synthetic construct
  source 1..15: mol_type = other DNA
agggactcatcagta

SEQ ID NO: 253 - DNA, 15 bp, synthetic construct
  source 1..15: mol_type = other DNA
tcacaacctcctcta

SEQ ID NO: 254 - DNA, 15 bp, synthetic construct
  source 1..15: mol_type = other DNA
tctgggctaggttaa

SEQ ID NO: 255 - DNA, 15 bp, synthetic construct
  source 1..15: mol_type = other DNA
gagactgtttaaatt

SEQ ID NO: 256 - DNA, 15 bp, synthetic construct
  source 1..15: mol_type = other DNA
aacaagacgtccaag

SEQ ID NO: 257 - DNA, 15 bp, synthetic construct
  source 1..15: mol_type = other DNA
gcaggcggtcatcgg

SEQ ID NO: 258 - DNA, 15 bp, synthetic construct
  source 1..15: mol_type = other DNA
atgaggacctggtgt

SEQ ID NO: 259 - DNA, 15 bp, synthetic construct
  source 1..15: mol_type = other DNA
tgctcacagaagtcg

SEQ ID NO: 260 - DNA, 15 bp, synthetic construct
  source 1..15: mol_type = other DNA
ctcctgtgaggtaaa

SEQ ID NO: 261 - DNA, 15 bp, synthetic construct
  source 1..15: mol_type = other DNA
ttctccttcagtgcg

SEQ ID NO: 262 - DNA, 15 bp, synthetic construct
  source 1..15: mol_type = other DNA
aacggcaaatctgac

SEQ ID NO: 263 - DNA, 15 bp, synthetic construct
  source 1..15: mol_type = other DNA
aggtgccaggtgctg

SEQ ID NO: 264 - DNA, 15 bp, synthetic construct
  source 1..15: mol_type = other DNA
tccagtggtcaggat

SEQ ID NO: 265 - DNA, 15 bp, synthetic construct
  source 1..15: mol_type = other DNA
acgactgtgagaagg

SEQ ID NO: 266 - DNA, 15 bp, synthetic construct
  source 1..15: mol_type = other DNA
tacgccatctcttcg

SEQ ID NO: 267 - DNA, 15 bp, synthetic construct
  source 1..15: mol_type = other DNA
acgactgtgagaagg

SEQ ID NO: 268 - DNA, 15 bp, synthetic construct
  source 1..15: mol_type = other DNA
tacgccatctcttcg

SEQ ID NO: 269 - DNA, 15 bp, synthetic construct
  source 1..15: mol_type = other DNA
ccctgtgggctgacc

SEQ ID NO: 270 - DNA, 15 bp, synthetic construct
  source 1..15: mol_type = other DNA
gatttctgcctgtct

SEQ ID NO: 271 - DNA, 15 bp, synthetic construct
  source 1..15: mol_type = other DNA
aatgacctgcaatag

SEQ ID NO: 272 - DNA, 15 bp, synthetic construct
  source 1..15: mol_type = other DNA
gaagtcatggactcg

SEQ ID NO: 273 - DNA, 15 bp, synthetic construct
  source 1..15: mol_type = other DNA
ctggcactcctcaat

SEQ ID NO: 274 - DNA, 15 bp, synthetic construct
  source 1..15: mol_type = other DNA
gggacgagtcagttc

SEQ ID NO: 275 - DNA, 15 bp, synthetic construct
  source 1..15: mol_type = other DNA
tgcagagggacgttc

SEQ ID NO: 276 - DNA, 15 bp, synthetic construct
  source 1..15: mol_type = other DNA
gcggcaccatgagtc

SEQ ID NO: 277 - DNA, 15 bp, synthetic construct
  source 1..15: mol_type = other DNA
cttacagccagttgc

SEQ ID NO: 278 - DNA, 15 bp, synthetic construct
  source 1..15: mol_type = other DNA
gcgctgacagtctgg

SEQ ID NO: 279 - DNA, 15 bp, synthetic construct
  source 1..15: mol_type = other DNA
tttcagacacctgtt

SEQ ID NO: 280 - DNA, 15 bp, synthetic construct
  source 1..15: mol_type = other DNA
aggacaggtcctttg

SEQ ID NO: 281 - DNA, 15 bp, synthetic construct
  source 1..15: mol_type = other DNA
gtgaagggctaactt

SEQ ID NO: 282 - DNA, 15 bp, synthetic construct
  source 1..15: mol_type = other DNA
cccacctcttgaact

SEQ ID NO: 283 - DNA, 15 bp, synthetic construct
  source 1..15: mol_type = other DNA
caaaaagaagaaacg

SEQ ID NO: 284 - DNA, 15 bp, synthetic construct
  source 1..15: mol_type = other DNA
ctacagtgcaaccca

SEQ ID NO: 285 - DNA, 15 bp, synthetic construct
  source 1..15: mol_type = other DNA
gcagatgagttagtg

SEQ ID NO: 286 - DNA, 15 bp, synthetic construct
  source 1..15: mol_type = other DNA
attgagcaggttcag

SEQ ID NO: 287 - DNA, 15 bp, synthetic construct
  source 1..15: mol_type = other DNA
tgatgtctatgagat

SEQ ID NO: 288 - DNA, 15 bp, synthetic construct
  source 1..15: mol_type = other DNA
tgcatctcccgaacg

SEQ ID NO: 289 - DNA, 15 bp, synthetic construct
  source 1..15: mol_type = other DNA
tgatgtctatgagat

SEQ ID NO: 290 - DNA, 15 bp, synthetic construct
  source 1..15: mol_type = other DNA
tgcatctcccgaacg

SEQ ID NO: 291 - DNA, 15 bp, synthetic construct
  source 1..15: mol_type = other DNA
cagggaaggaatgct

SEQ ID NO: 292 - DNA, 15 bp, synthetic construct
  source 1..15: mol_type = other DNA
atgtaccttctccac

SEQ ID NO: 293 - DNA, 15 bp, synthetic construct
  source 1..15: mol_type = other DNA
cctttttctctttgt

SEQ ID NO: 294 - DNA, 15 bp, synthetic construct
  source 1..15: mol_type = other DNA
aacatcccctacaac

SEQ ID NO: 295 - DNA, 15 bp, synthetic construct
  source 1..15: mol_type = other DNA
gcaagatgggagacc

SEQ ID NO: 296 - DNA, 15 bp, synthetic construct
  source 1..15: mol_type = other DNA
ttctggtttaattcc

SEQ ID NO: 297 - DNA, 15 bp, synthetic construct
  source 1..15: mol_type = other DNA
gaatgataccatgat

SEQ ID NO: 298 - DNA, 15 bp, synthetic construct
  source 1..15: mol_type = other DNA
tctctctcttttgac

SEQ ID NO: 299 - DNA, 15 bp, synthetic construct
  source 1..15: mol_type = other DNA
aggatctgggtctca

SEQ ID NO: 300 - DNA, 15 bp, synthetic construct
  source 1..15: mol_type = other DNA
cctctgctgcacatg

SEQ ID NO: 301 - DNA, 15 bp, synthetic construct
  source 1..15: mol_type = other DNA
actctcgggcagcag

SEQ ID NO: 302 - DNA, 15 bp, synthetic construct
  source 1..15: mol_type = other DNA
ctccacacactctgc

SEQ ID NO: 303 - DNA, 15 bp, synthetic construct
  source 1..15: mol_type = other DNA
ccagtggacaaaggt

SEQ ID NO: 304 - DNA, 15 bp, synthetic construct
  source 1..15: mol_type = other DNA
acaatcacaaccatg

SEQ ID NO: 305 - DNA, 15 bp, synthetic construct
  source 1..15: mol_type = other DNA
ttgtgattgtgcagg

SEQ ID NO: 306 - DNA, 15 bp, synthetic construct
  source 1..15: mol_type = other DNA
taggtcacatccaat

SEQ ID NO: 307 - DNA, 15 bp, synthetic construct
  source 1..15: mol_type = other DNA
tcatgccaactacgc

SEQ ID NO: 308 - DNA, 15 bp, synthetic construct
  source 1..15: mol_type = other DNA
cactatcctgcacct

SEQ ID NO: 309 - DNA, 15 bp, synthetic construct
  source 1..15: mol_type = other DNA
actgtgaggaaaact

SEQ ID NO: 310 - DNA, 15 bp, synthetic construct
  source 1..15: mol_type = other DNA
gggcatcattgctag

SEQ ID NO: 311 - DNA, 15 bp, synthetic construct
  source 1..15: mol_type = other DNA
tgcgtaggaagactg

SEQ ID NO: 312 - DNA, 15 bp, synthetic construct
  source 1..15: mol_type = other DNA
tgaccctccttctcg

SEQ ID NO: 313 - DNA, 15 bp, synthetic construct
  source 1..15: mol_type = other DNA
tatggtcccgctact

SEQ ID NO: 314 - DNA, 15 bp, synthetic construct
  source 1..15: mol_type = other DNA
caacgaagccaatca

SEQ ID NO: 315 - DNA, 15 bp, synthetic construct
  source 1..15: mol_type = other DNA
aggcctgaaggttaa

SEQ ID NO: 316 - DNA, 15 bp, synthetic construct
  source 1..15: mol_type = other DNA
cagcattcggaggtg

SEQ ID NO: 317 - DNA, 15 bp, synthetic construct
  source 1..15: mol_type = other DNA
acaatgaactcttgc

SEQ ID NO: 318 - DNA, 15 bp, synthetic construct
  source 1..15: mol_type = other DNA
ctgcattgagtgtgg

SEQ ID NO: 319 - DNA, 15 bp, synthetic construct
  source 1..15: mol_type = other DNA
acaaggtcataactc

SEQ ID NO: 320 - DNA, 15 bp, synthetic construct
  source 1..15: mol_type = other DNA
gcctttaccagtcta

SEQ ID NO: 321 - DNA, 15 bp, synthetic construct
  source 1..15: mol_type = other DNA
ttcttcaccctctcc

SEQ ID NO: 322 - DNA, 15 bp, synthetic construct
  source 1..15: mol_type = other DNA
ctcttctgagtagcg

SEQ ID NO: 323 - DNA, 15 bp, synthetic construct
  source 1..15: mol_type = other DNA
acttaccgggatgct

SEQ ID NO: 324 - DNA, 15 bp, synthetic construct
  source 1..15: mol_type = other DNA
ggtccacatgggaga

SEQ ID NO: 325 - DNA, 15 bp, synthetic construct
  source 1..15: mol_type = other DNA
gagaagcctagttct

SEQ ID NO: 326 - DNA, 15 bp, synthetic construct
  source 1..15: mol_type = other DNA
aaccttttgctttgc

SEQ ID NO: 327 - DNA, 15 bp, synthetic construct
  source 1..15: mol_type = other DNA
acttgccgcgttctc

SEQ ID NO: 328 - DNA, 15 bp, synthetic construct
  source 1..15: mol_type = other DNA
gtcatgagtgactgc

SEQ ID NO: 329 - DNA, 15 bp, synthetic construct
  source 1..15: mol_type = other DNA
tactgtcagccttac

SEQ ID NO: 330 - DNA, 15 bp, synthetic construct
  source 1..15: mol_type = other DNA
agatgtacaactagg

SEQ ID NO: 331 - DNA, 15 bp, synthetic construct
  source 1..15: mol_type = other DNA
ctaaaaatcatgtat

SEQ ID NO: 332 - DNA, 15 bp, synthetic construct
  source 1..15: mol_type = other DNA
tgagaccaaaacagg

SEQ ID NO: 333 - DNA, 15 bp, synthetic construct
  source 1..15: mol_type = other DNA
aaaacattcagggaa

SEQ ID NO: 334 - DNA, 15 bp, synthetic construct
  source 1..15: mol_type = other DNA
agctggtcattatac

SEQ ID NO: 335 - DNA, 15 bp, synthetic construct
  source 1..15: mol_type = other DNA
gctcgagactccgtt

SEQ ID NO: 336 - DNA, 15 bp, synthetic construct
  source 1..15: mol_type = other DNA
cgcattgaccaggta

SEQ ID NO: 337 - DNA, 15 bp, synthetic construct
  source 1..15: mol_type = other DNA
cgctttgtgccttcc

SEQ ID NO: 338 - DNA, 15 bp, synthetic construct
  source 1..15: mol_type = other DNA
agagaatgtacttca

SEQ ID NO: 339 - DNA, 15 bp, synthetic construct
  source 1..15: mol_type = other DNA
tgggaacattgtgag

SEQ ID NO: 340 - DNA, 15 bp, synthetic construct
  source 1..15: mol_type = other DNA
gacaaggtccttaat

SEQ ID NO: 341 - DNA, 15 bp, synthetic construct
  source 1..15: mol_type = other DNA
gagtagtggcaatga

SEQ ID NO: 342 - DNA, 15 bp, synthetic construct
  source 1..15: mol_type = other DNA
ctgtctttaaatact

SEQ ID NO: 343 - DNA, 15 bp, synthetic construct
  source 1..15: mol_type = other DNA
attatcgccaaggat

SEQ ID NO: 344 - DNA, 15 bp, synthetic construct
  source 1..15: mol_type = other DNA
tcaatagtgagggtt

SEQ ID NO: 345 - DNA, 15 bp, synthetic construct
  source 1..15: mol_type = other DNA
aggaaaagtttgatg

SEQ ID NO: 346 - DNA, 15 bp, synthetic construct
  source 1..15: mol_type = other DNA
cacctctttgtatag

SEQ ID NO: 347 - DNA, 15 bp, synthetic construct
  source 1..15: mol_type = other DNA
cgagtcctgtagcac

SEQ ID NO: 348 - DNA, 15 bp, synthetic construct
  source 1..15: mol_type = other DNA
gatttaggcttgctt

SEQ ID NO: 349 - DNA, 15 bp, synthetic construct
  source 1..15: mol_type = other DNA
gttttccattttgtt

SEQ ID NO: 350 - DNA, 15 bp, synthetic construct
  source 1..15: mol_type = other DNA
acattgcagcctatc

SEQ ID NO: 351 - DNA, 15 bp, synthetic construct
  source 1..15: mol_type = other DNA
cacaatgtcctgtcc

SEQ ID NO: 352 - DNA, 15 bp, synthetic construct
  source 1..15: mol_type = other DNA
gatggtagcttttca

SEQ ID NO: 353 - DNA, 15 bp, synthetic construct
  source 1..15: mol_type = other DNA
tctctccctgtgtaa

SEQ ID NO: 354 - DNA, 15 bp, synthetic construct
  source 1..15: mol_type = other DNA
ggtgccgtagacctg

SEQ ID NO: 355 - DNA, 15 bp, synthetic construct
  source 1..15: mol_type = other DNA
cgttcctcatgagcc

SEQ ID NO: 356 - DNA, 15 bp, synthetic construct
  source 1..15: mol_type = other DNA
gtcaaaatgagaaga

SEQ ID NO: 357 - DNA, 15 bp, synthetic construct
  source 1..15: mol_type = other DNA
atgaagaaccaggaa

SEQ ID NO: 358 - DNA, 15 bp, synthetic construct
  source 1..15: mol_type = other DNA
ccttgaaagtcagag

SEQ ID NO: 359 - DNA, 15 bp, synthetic construct
  source 1..15: mol_type = other DNA
gcagatcaccttcgt

SEQ ID NO: 360 - DNA, 15 bp, synthetic construct
  source 1..15: mol_type = other DNA
agagttgaaaacagt

SEQ ID NO: 361 - DNA, 15 bp, synthetic construct
  source 1..15: mol_type = other DNA
ggtgtttgctgagtg

SEQ ID NO: 362 - DNA, 15 bp, synthetic construct
  source 1..15: mol_type = other DNA
tggttcccagcttcg

SEQ ID NO: 363 - DNA, 15 bp, synthetic construct
  source 1..15: mol_type = other DNA
aaagtcatgagctac

SEQ ID NO: 364 - DNA, 15 bp, synthetic construct
  source 1..15: mol_type = other DNA
tttaacccttgaact

SEQ ID NO: 365 - DNA, 15 bp, synthetic construct
  source 1..15: mol_type = other DNA
gaactgcaggagtga

SEQ ID NO: 366 - DNA, 15 bp, synthetic construct
  source 1..15: mol_type = other DNA
gtggagatgcattgg

SEQ ID NO: 367 - DNA, 15 bp, synthetic construct
  source 1..15: mol_type = other DNA
ccttccaagatgacc

SEQ ID NO: 368 - DNA, 15 bp, synthetic construct
  source 1..15: mol_type = other DNA
tgtccttgggtaccg

SEQ ID NO: 369 - DNA, 15 bp, synthetic construct
  source 1..15: mol_type = other DNA
tgccctgattgatgc

SEQ ID NO: 370 - DNA, 15 bp, synthetic construct
  source 1..15: mol_type = other DNA
ggagcacaaacatct

SEQ ID NO: 371 - DNA, 15 bp, synthetic construct
  source 1..15: mol_type = other DNA
gacctgtactatggg

SEQ ID NO: 372 - DNA, 15 bp, synthetic construct
  source 1..15: mol_type = other DNA
catcccctccctgtg

SEQ ID NO: 373 - DNA, 15 bp, synthetic construct
  source 1..15: mol_type = other DNA
ctagaagggtggctc

SEQ ID NO: 374 - DNA, 15 bp, synthetic construct
  source 1..15: mol_type = other DNA
attggatgatattta

SEQ ID NO: 375 - DNA, 15 bp, synthetic construct
  source 1..15: mol_type = other DNA
agctacttgttaatt

SEQ ID NO: 376 - DNA, 15 bp, synthetic construct
  source 1..15: mol_type = other DNA
tcaagcgctgcttag

SEQ ID NO: 377 - DNA, 15 bp, synthetic construct
  source 1..15: mol_type = other DNA
gccgaggatccatcg

SEQ ID NO: 378 - DNA, 15 bp, synthetic construct
  source 1..15: mol_type = other DNA
tctgatgagcacacc

SEQ ID NO: 379 - DNA, 15 bp, synthetic construct
  source 1..15: mol_type = other DNA
atattagaagctcac

SEQ ID NO: 380 - DNA, 15 bp, synthetic construct
  source 1..15: mol_type = other DNA
acattcaagctactc

SEQ ID NO: 381 - DNA, 15 bp, synthetic construct
  source 1..15: mol_type = other DNA
gagatcctgttcatt

SEQ ID NO: 382 - DNA, 15 bp, synthetic construct
  source 1..15: mol_type = other DNA
gctaaagtggagtct

SEQ ID NO: 383 - DNA, 15 bp, synthetic construct
  source 1..15: mol_type = other DNA
cctgctcttcaagga

SEQ ID NO: 384 - DNA, 15 bp, synthetic construct
  source 1..15: mol_type = other DNA
tcaagagtggttccg

SEQ ID NO: 385 - DNA, 15 bp, synthetic construct
  source 1..15: mol_type = other DNA
acgctgtagtgaagg

SEQ ID NO: 386 - DNA, 15 bp, synthetic construct
  source 1..15: mol_type = other DNA
agggaggaactcttg

SEQ ID NO: 387 - DNA, 15 bp, synthetic construct
  source 1..15: mol_type = other DNA
tttacatgacaatga

SEQ ID NO: 388 - DNA, 15 bp, synthetic construct
  source 1..15: mol_type = other DNA
tcttgtttatcaact

SEQ ID NO: 389 - DNA, 15 bp, synthetic construct
  source 1..15: mol_type = other DNA
aaacaacactggcaa

SEQ ID NO: 390 - DNA, 15 bp, synthetic construct
  source 1..15: mol_type = other DNA
aagcatgtcaaagat

SEQ ID NO: 391 - DNA, 15 bp, synthetic construct
  source 1..15: mol_type = other DNA
ttgctcacctctcgg

SEQ ID NO: 392 - DNA, 15 bp, synthetic construct
  source 1..15: mol_type = other DNA
aggacgagtgacctt

SEQ ID NO: 393 - DNA, 15 bp, synthetic construct
  source 1..15: mol_type = other DNA
gcaaaggacaatagc

SEQ ID NO: 394 - DNA, 15 bp, synthetic construct
  source 1..15: mol_type = other DNA
ctcaaagcaatatcc

SEQ ID NO: 395 - DNA, 15 bp, synthetic construct
  source 1..15: mol_type = other DNA
aggcccctatattga

SEQ ID NO: 396 - DNA, 15 bp, synthetic construct
  source 1..15: mol_type = other DNA
acggatgccactatt

SEQ ID NO: 397 - DNA, 15 bp, synthetic construct
  source 1..15: mol_type = other DNA
ttcttcacatactgc

SEQ ID NO: 398 - DNA, 15 bp, synthetic construct
  source 1..15: mol_type = other DNA
cctcctctgtacata

SEQ ID NO: 399 - DNA, 15 bp, synthetic construct
  source 1..15: mol_type = other DNA
atcctgagttcagtg

SEQ ID NO: 400 - DNA, 15 bp, synthetic construct
  source 1..15: mol_type = other DNA
tcttgaccagggagt

SEQ ID NO: 401 - DNA, 15 bp, synthetic construct
  source 1..15: mol_type = other DNA
gttgacttcaatgcc

SEQ ID NO: 402 - DNA, 15 bp, synthetic construct
  source 1..15: mol_type = other DNA
aaatcaaagctaggg

SEQ ID NO: 403 - DNA, 15 bp, synthetic construct
  source 1..15: mol_type = other DNA
aactccagctctcga

SEQ ID NO: 404 - DNA, 15 bp, synthetic construct
  source 1..15: mol_type = other DNA
gagctcaacatcagc

SEQ ID NO: 405 - DNA, 15 bp, synthetic construct
  source 1..15: mol_type = other DNA
tgtccacctctacag

SEQ ID NO: 406 - DNA, 15 bp, synthetic construct
  source 1..15: mol_type = other DNA
atgtgcttgtagttc

SEQ ID NO: 407 - DNA, 15 bp, synthetic construct
  source 1..15: mol_type = other DNA
ttgtgttcatcttcc

SEQ ID NO: 408 - DNA, 15 bp, synthetic construct
  source 1..15: mol_type = other DNA
tgatggcacctttga

SEQ ID NO: 409 - DNA, 15 bp, synthetic construct
  source 1..15: mol_type = other DNA
gaaacctgccaatcc

SEQ ID NO: 410 - DNA, 15 bp, synthetic construct
  source 1..15: mol_type = other DNA
aggaaggctctgttg

SEQ ID NO: 411 - DNA, 15 bp, synthetic construct
  source 1..15: mol_type = other DNA
tgagctcggcatcct

SEQ ID NO: 412 - DNA, 15 bp, synthetic construct
  source 1..15: mol_type = other DNA
tggtctcccgtggtg

SEQ ID NO: 413 - DNA, 15 bp, synthetic construct
  source 1..15: mol_type = other DNA
gtgtcccaagtgatg

SEQ ID NO: 414 - DNA, 15 bp, synthetic construct
  source 1..15: mol_type = other DNA
cttcctcaagtatgt

SEQ ID NO: 415 - DNA, 15 bp, synthetic construct
  source 1..15: mol_type = other DNA
agtgtttcccttctc

SEQ ID NO: 416 - DNA, 15 bp, synthetic construct
  source 1..15: mol_type = other DNA
aattaaatttgtgct

SEQ ID NO: 417 - DNA, 15 bp, synthetic construct
  source 1..15: mol_type = other DNA
agggatatctcctgc

SEQ ID NO: 418 - DNA, 15 bp, synthetic construct
  source 1..15: mol_type = other DNA
tcaaacgctaatgag

SEQ ID NO: 419 - DNA, 15 bp, synthetic construct
  source 1..15: mol_type = other DNA
aagggtacgcctctc

SEQ ID NO: 420 - DNA, 15 bp, synthetic construct
  source 1..15: mol_type = other DNA
gcaggctatacagtt

SEQ ID NO: 421 - DNA, 15 bp, synthetic construct
  source 1..15: mol_type = other DNA
tctcttaagtggtga

SEQ ID NO: 422 - DNA, 15 bp, synthetic construct
  source 1..15: mol_type = other DNA
ctctgagctaacatg

SEQ ID NO: 423 - DNA, 15 bp, synthetic construct
  source 1..15: mol_type = other DNA
tacaatgtgtggagt

SEQ ID NO: 424 - DNA, 15 bp, synthetic construct
  source 1..15: mol_type = other DNA
aatcctcgaacacaa

SEQ ID NO: 425 - DNA, 15 bp, synthetic construct
  source 1..15: mol_type = other DNA
gatggtacagccttc

SEQ ID NO: 426 - DNA, 15 bp, synthetic construct
  source 1..15: mol_type = other DNA
aatgaagagtaaccg

SEQ ID NO: 427 - DNA, 15 bp, synthetic construct
  source 1..15: mol_type = other DNA
cgatctagagtgctt

SEQ ID NO: 428 - DNA, 15 bp, synthetic construct
  source 1..15: mol_type = other DNA
ctactcacaggatag

SEQ ID NO: 429 - DNA, 15 bp, synthetic construct
  source 1..15: mol_type = other DNA
agtcgcaggaaattg

SEQ ID NO: 430 - DNA, 15 bp, synthetic construct
  source 1..15: mol_type = other DNA
ccttaacaccggctt

SEQ ID NO: 431 - DNA, 15 bp, synthetic construct
  source 1..15: mol_type = other DNA
ggactaaactaagaa

SEQ ID NO: 432 - DNA, 15 bp, synthetic construct
  source 1..15: mol_type = other DNA
ttaaacatcccacaa

SEQ ID NO: 433 - DNA, 15 bp, synthetic construct
  source 1..15: mol_type = other DNA
atatttccctcacta

SEQ ID NO: 434 - DNA, 15 bp, synthetic construct
  source 1..15: mol_type = other DNA
gaagctgctgccact

SEQ ID NO: 435 - DNA, 15 bp, synthetic construct
  source 1..15: mol_type = other DNA
gcagcttcattataa

SEQ ID NO: 436 - DNA, 15 bp, synthetic construct
  source 1..15: mol_type = other DNA
taaacatgtgcttta

SEQ ID NO: 437 - DNA, 15 bp, synthetic construct
  source 1..15: mol_type = other DNA
attaagtgatagagc

SEQ ID NO: 438 - DNA, 15 bp, synthetic construct
  source 1..15: mol_type = other DNA
acaagaattggaggt

SEQ ID NO: 439 - DNA, 15 bp, synthetic construct
  source 1..15: mol_type = other DNA
cgaatgagcatgatt

SEQ ID NO: 440 - DNA, 15 bp, synthetic construct
  source 1..15: mol_type = other DNA
aaagatcttaaggag

SEQ ID NO: 441 - DNA, 15 bp, synthetic construct
  source 1..15: mol_type = other DNA
cgaatgagcatgatt

SEQ ID NO: 442 - DNA, 15 bp, synthetic construct
  source 1..15: mol_type = other DNA
aaagatcttaaggag

SEQ ID NO: 443 - DNA, 15 bp, synthetic construct
  source 1..15: mol_type = other DNA
accaatttcctgact

SEQ ID NO: 444 - DNA, 15 bp, synthetic construct
  source 1..15: mol_type = other DNA
ccctagccattcgac

SEQ ID NO: 445 - DNA, 15 bp, synthetic construct
  source 1..15: mol_type = other DNA
aactgccttgttttg

SEQ ID NO: 446 - DNA, 15 bp, synthetic construct
  source 1..15: mol_type = other DNA
tctagtcttaactgc

SEQ ID NO: 447 - DNA, 15 bp, synthetic construct
  source 1..15: mol_type = other DNA
tccacatttcttgtt

SEQ ID NO: 448 - DNA, 15 bp, synthetic construct
  source 1..15: mol_type = other DNA
actgattagttgttt

SEQ ID NO: 449 - DNA, 15 bp, synthetic construct
  source 1..15: mol_type = other DNA
tcaccataccaggat

SEQ ID NO: 450 - DNA, 15 bp, synthetic construct
  source 1..15: mol_type = other DNA
tgtagccatatgaaa

SEQ ID NO: 451 - DNA, 15 bp, synthetic construct
  source 1..15: mol_type = other DNA
tcactttttataggt

SEQ ID NO: 452 - DNA, 15 bp, synthetic construct
  source 1..15: mol_type = other DNA
ggtcatgaaaacctc

SEQ ID NO: 453 - DNA, 15 bp, synthetic construct
  source 1..15: mol_type = other DNA
cttgagcatctgtaa

SEQ ID NO: 454 - DNA, 15 bp, synthetic construct
  source 1..15: mol_type = other DNA
tgatccaactggtga

SEQ ID NO: 455 - DNA, 15 bp, synthetic construct
  source 1..15: mol_type = other DNA
cttgagcatctgtaa

SEQ ID NO: 456 - DNA, 15 bp, synthetic construct
  source 1..15: mol_type = other DNA
tgatccaactggtga

SEQ ID NO: 457 - DNA, 15 bp, synthetic construct
  source 1..15: mol_type = other DNA
taatggataggtgtg

SEQ ID NO: 458 - DNA, 15 bp, synthetic construct
  source 1..15: mol_type = other DNA
aaatctttcagatcc

SEQ ID NO: 459 - DNA, 15 bp, synthetic construct
  source 1..15: mol_type = other DNA
aatggttggttgata

SEQ ID NO: 460 - DNA, 15 bp, synthetic construct
  source 1..15: mol_type = other DNA
atttttaatggcaat

SEQ ID NO: 461 - DNA, 15 bp, synthetic construct
  source 1..15: mol_type = other DNA
ttggctacggatgca

SEQ ID NO: 462 - DNA, 15 bp, synthetic construct
  source 1..15: mol_type = other DNA
gagcttctccagctt

SEQ ID NO: 463 - DNA, 15 bp, synthetic construct
  source 1..15: mol_type = other DNA
gaaatcctgtatgac

SEQ ID NO: 464 - DNA, 15 bp, synthetic construct
  source 1..15: mol_type = other DNA
tcaaaactgaacatg

SEQ ID NO: 465 - DNA, 15 bp, synthetic construct
  source 1..15: mol_type = other DNA
gtgatttttctggaa

SEQ ID NO: 466 - DNA, 15 bp, synthetic construct
  source 1..15: mol_type = other DNA
tgccatgcagctata

SEQ ID NO: 467 - DNA, 15 bp, synthetic construct
  source 1..15: mol_type = other DNA
gtcttctttattgcc

SEQ ID NO: 468 - DNA, 15 bp, synthetic construct
  source 1..15: mol_type = other DNA
gacataaccttgcat

SEQ ID NO: 469 - DNA, 15 bp, synthetic construct
  source 1..15: mol_type = other DNA
ctaattcagtagaaa

SEQ ID NO: 470 - DNA, 15 bp, synthetic construct
  source 1..15: mol_type = other DNA
gagaagctgattggc

SEQ ID NO: 471 - DNA, 15 bp, synthetic construct
  source 1..15: mol_type = other DNA
caactggactaaaga

SEQ ID NO: 472 - DNA, 15 bp, synthetic construct
  source 1..15: mol_type = other DNA
atgacaatgccaact

SEQ ID NO: 473 - DNA, 15 bp, synthetic construct
  source 1..15: mol_type = other DNA
taacacccttgggac

SEQ ID NO: 474 - DNA, 15 bp, synthetic construct
  source 1..15: mol_type = other DNA
agccataggtgtcat

SEQ ID NO: 475 - DNA, 15 bp, synthetic construct
  source 1..15: mol_type = other DNA
atttgcaaaatagtc

SEQ ID NO: 476 - DNA, 15 bp, synthetic construct
  source 1..15: mol_type = other DNA
aaccataaacaacag

SEQ ID NO: 477 - DNA, 15 bp, synthetic construct
  source 1..15: mol_type = other DNA
aactgacgattggca

SEQ ID NO: 478 - DNA, 15 bp, synthetic construct
  source 1..15: mol_type = other DNA
ggcagtagtatcctg

SEQ ID NO: 479 - DNA, 15 bp, synthetic construct
  source 1..15: mol_type = other DNA
aaatgcctaaagaga

SEQ ID NO: 480 - DNA, 15 bp, synthetic construct
  source 1..15: mol_type = other DNA
aaatgagagcactac

SEQ ID NO: 481 - DNA, 15 bp, synthetic construct
  source 1..15: mol_type = other DNA
aattcttgtctttca

SEQ ID NO: 482 - DNA, 15 bp, synthetic construct
  source 1..15: mol_type = other DNA
gtcctactaaaatca

SEQ ID NO: 483 - DNA, 15 bp, synthetic construct
  source 1..15: mol_type = other DNA
accacaacttcatca

SEQ ID NO: 484 - DNA, 15 bp, synthetic construct
  source 1..15: mol_type = other DNA
agcaaatgctgactt

SEQ ID NO: 485 - DNA, 15 bp, synthetic construct
  source 1..15: mol_type = other DNA
gctggctccagagat

SEQ ID NO: 486 - DNA, 15 bp, synthetic construct
  source 1..15: mol_type = other DNA
ggtcaagttcatcac

SEQ ID NO: 487 - DNA, 15 bp, synthetic construct
  source 1..15: mol_type = other DNA
ctggtggtcacatct

SEQ ID NO: 488 - DNA, 15 bp, synthetic construct
  source 1..15: mol_type = other DNA
gctcagaccattctc

SEQ ID NO: 489 - DNA, 15 bp, synthetic construct
  source 1..15: mol_type = other DNA
ggctgggaaaggatg

SEQ ID NO: 490 - DNA, 15 bp, synthetic construct
  source 1..15: mol_type = other DNA
tgactttccagctca

SEQ ID NO: 491 - DNA, 15 bp, synthetic construct
  source 1..15: mol_type = other DNA
tggttgggcaatact

SEQ ID NO: 492 - DNA, 15 bp, synthetic construct
  source 1..15: mol_type = other DNA
tgagtaggctccatc

SEQ ID NO: 493 - DNA, 15 bp, synthetic construct
  source 1..15: mol_type = other DNA
caggaccataccaaa

SEQ ID NO: 494 - DNA, 15 bp, synthetic construct
  source 1..15: mol_type = other DNA
tatctttttctaacc

SEQ ID NO: 495 - DNA, 15 bp, synthetic construct
  source 1..15: mol_type = other DNA
gctgcatttcatgaa

SEQ ID NO: 496 - DNA, 15 bp, synthetic construct
  source 1..15: mol_type = other DNA
tagaatctcctcaca

SEQ ID NO: 497 - DNA, 15 bp, synthetic construct
  source 1..15: mol_type = other DNA
tgtcggaaacatacg

SEQ ID NO: 498 - DNA, 15 bp, synthetic construct
  source 1..15: mol_type = other DNA
tttcctcagcctgaa

SEQ ID NO: 499 - DNA, 15 bp, synthetic construct
  source 1..15: mol_type = other DNA
tcactcagagacttc

SEQ ID NO: 500 - DNA, 15 bp, synthetic construct
  source 1..15: mol_type = other DNA
tgaatacaatgtgac

SEQ ID NO: 501 - DNA, 15 bp, synthetic construct
  source 1..15: mol_type = other DNA
agcagaagtcaacac

SEQ ID NO: 502 - DNA, 15 bp, synthetic construct
  source 1..15: mol_type = other DNA
gtgatgggccttttc

SEQ ID NO: 503 - DNA, 15 bp, synthetic construct
  source 1..15: mol_type = other DNA
ggtctgtgatgtctc

SEQ ID NO: 504 - DNA, 15 bp, synthetic construct
  source 1..15: mol_type = other DNA
acattggtagaggca

SEQ ID NO: 505 - DNA, 15 bp, synthetic construct
  source 1..15: mol_type = other DNA
ctgtaaggagaaacg

SEQ ID NO: 506 - DNA, 15 bp, synthetic construct
  source 1..15: mol_type = other DNA
ttcattgtgcaagtc

SEQ ID NO: 507 - DNA, 15 bp, synthetic construct
  source 1..15: mol_type = other DNA
ccctcgtcagaggca

SEQ ID NO: 508 - DNA, 15 bp, synthetic construct
  source 1..15: mol_type = other DNA
ttccttcatccaggt

SEQ ID NO: 509 - DNA, 15 bp, synthetic construct
  source 1..15: mol_type = other DNA
tattcaagtgactct

SEQ ID NO: 510 - DNA, 15 bp, synthetic construct
  source 1..15: mol_type = other DNA
cttctgctaacatca

SEQ ID NO: 511 - DNA, 15 bp, synthetic construct
  source 1..15: mol_type = other DNA
accagtccggtctgt

SEQ ID NO: 512 - DNA, 15 bp, synthetic construct
  source 1..15: mol_type = other DNA
ccatagggttaacta

SEQ ID NO: 513 - DNA, 15 bp, synthetic construct
  source 1..15: mol_type = other DNA
gaaccatgggcagac

SEQ ID NO: 514 - DNA, 15 bp, synthetic construct
  source 1..15: mol_type = other DNA
ggtggtggccagatt

SEQ ID NO: 515 - DNA, 15 bp, synthetic construct
  source 1..15: mol_type = other DNA
aaggacagaaatttg

SEQ ID NO: 516 - DNA, 15 bp, synthetic construct
  source 1..15: mol_type = other DNA
gccacgggagtgtgt

SEQ ID NO: 517 - DNA, 15 bp, synthetic construct
  source 1..15: mol_type = other DNA
gtggcttattggcaa

SEQ ID NO: 518 - DNA, 15 bp, synthetic construct
  source 1..15: mol_type = other DNA
ctgtctctgtggact

SEQ ID NO: 519 - DNA, 15 bp, synthetic construct
  source 1..15: mol_type = other DNA
tttcccctttacacc

SEQ ID NO: 520 - DNA, 15 bp, synthetic construct
  source 1..15: mol_type = other DNA
cccccatctctcctc

SEQ ID NO: 521 - DNA, 15 bp, synthetic construct
  source 1..15: mol_type = other DNA
ttcagaaaccaaaca

SEQ ID NO: 522 - DNA, 15 bp, synthetic construct
  source 1..15: mol_type = other DNA
cctggcagaaggtac

SEQ ID NO: 523 - DNA, 15 bp, synthetic construct
  source 1..15: mol_type = other DNA
catcctggagcagtt

SEQ ID NO: 524 - DNA, 15 bp, synthetic construct
  source 1..15: mol_type = other DNA
ctgagctcttttgcc

SEQ ID NO: 525 - DNA, 15 bp, synthetic construct
  source 1..15: mol_type = other DNA
gcagcttaggctgaa

SEQ ID NO: 526 - DNA, 15 bp, synthetic construct
  source 1..15: mol_type = other DNA
tctctcaccatggag

SEQ ID NO: 527 - DNA, 15 bp, synthetic construct
  source 1..15: mol_type = other DNA
tcccagcagggaagt

SEQ ID NO: 528 - DNA, 15 bp, synthetic construct
  source 1..15: mol_type = other DNA
tccttattactcctg

SEQ ID NO: 529 - DNA, 15 bp, synthetic construct
  source 1..15: mol_type = other DNA
cggctacccgagaat

SEQ ID NO: 530 - DNA, 15 bp, synthetic construct
  source 1..15: mol_type = other DNA
ttcctcactgatttc

SEQ ID NO: 531 - DNA, 15 bp, synthetic construct
  source 1..15: mol_type = other DNA
tcagttctgttcaca

SEQ ID NO: 532 - DNA, 15 bp, synthetic construct
  source 1..15: mol_type = other DNA
cccagcaaagtttgt

SEQ ID NO: 533 - DNA, 15 bp, synthetic construct
  source 1..15: mol_type = other DNA
cagggcccaatttgt

SEQ ID NO: 534 - DNA, 15 bp, synthetic construct
  source 1..15: mol_type = other DNA
taatggtggtcagtg

SEQ ID NO: 535 - DNA, 15 bp, synthetic construct
  source 1..15: mol_type = other DNA
caactgtagcctcca

SEQ ID NO: 536 - DNA, 15 bp, synthetic construct
  source 1..15: mol_type = other DNA
tcccactaccagttg

SEQ ID NO: 537 - DNA, 15 bp, synthetic construct
  source 1..15: mol_type = other DNA
aaaccacaacatcag

SEQ ID NO: 538 - DNA, 15 bp, synthetic construct
  source 1..15: mol_type = other DNA
gaggcacctgtattg

SEQ ID NO: 539 - DNA, 15 bp, synthetic construct
  source 1..15: mol_type = other DNA
agagcacttgaaatg

SEQ ID NO: 540 - DNA, 15 bp, synthetic construct
  source 1..15: mol_type = other DNA
gatctcactagctct

SEQ ID NO: 541 - DNA, 15 bp, synthetic construct
  source 1..15: mol_type = other DNA
ctcctgggaggtcca

SEQ ID NO: 542 - DNA, 15 bp, synthetic construct
  source 1..15: mol_type = other DNA
acatttctccctcac

SEQ ID NO: 543 - DNA, 15 bp, synthetic construct
  source 1..15: mol_type = other DNA
taaatgccactggac

SEQ ID NO: 544 - DNA, 15 bp, synthetic construct
  source 1..15: mol_type = other DNA
tgtacacccctgcct

SEQ ID NO: 545 - DNA, 15 bp, synthetic construct
  source 1..15: mol_type = other DNA
ggcacgtcacaatag

SEQ ID NO: 546 - DNA, 15 bp, synthetic construct
  source 1..15: mol_type = other DNA
ttactagatgaaggc

SEQ ID NO: 547 - DNA, 15 bp, synthetic construct
  source 1..15: mol_type = other DNA
cagctgctctagggg

SEQ ID NO: 548 - DNA, 15 bp, synthetic construct
  source 1..15: mol_type = other DNA
ttagctcctgtttca

SEQ ID NO: 549 - DNA, 15 bp, synthetic construct
  source 1..15: mol_type = other DNA
atgggaaggaagtca

SEQ ID NO: 550 - DNA, 15 bp, synthetic construct
  source 1..15: mol_type = other DNA
gttgctctgtttgct

SEQ ID NO: 551 - DNA, 15 bp, synthetic construct
  source 1..15: mol_type = other DNA
gactgggatccatgt

SEQ ID NO: 552 - DNA, 15 bp, synthetic construct
  source 1..15: mol_type = other DNA
tggagggacctgctc

SEQ ID NO: 553 - DNA, 15 bp, synthetic construct
  source 1..15: mol_type = other DNA
ctcagtgcactcatt

SEQ ID NO: 554 - DNA, 15 bp, synthetic construct
  source 1..15: mol_type = other DNA
gtctaattcttttgt

SEQ ID NO: 555 - DNA, 15 bp, synthetic construct
  source 1..15: mol_type = other DNA
ctgtgtgttttcctc

SEQ ID NO: 556 - DNA, 15 bp, synthetic construct
  source 1..15: mol_type = other DNA
ttttgtgggaatcag

SEQ ID NO: 557 - DNA, 15 bp, synthetic construct
  source 1..15: mol_type = other DNA
acctgaccactttgt

SEQ ID NO: 558 - DNA, 15 bp, synthetic construct
  source 1..15: mol_type = other DNA
ataaggaaaattttc

SEQ ID NO: 559 - DNA, 15 bp, synthetic construct
  source 1..15: mol_type = other DNA
tcaggcactgacaaa

SEQ ID NO: 560 - DNA, 15 bp, synthetic construct
  source 1..15: mol_type = other DNA
gatgaggctgtcaga

SEQ ID NO: 561 - DNA, 15 bp, synthetic construct
  source 1..15: mol_type = other DNA
acgcagaaagatgta

SEQ ID NO: 562 - DNA, 15 bp, synthetic construct
  source 1..15: mol_type = other DNA
tctatgactcaatca

SEQ ID NO: 563 - DNA, 15 bp, synthetic construct
  source 1..15: mol_type = other DNA
aaactatcacatggg

SEQ ID NO: 564 - DNA, 15 bp, synthetic construct
  source 1..15: mol_type = other DNA
tgactaacactgtcc

SEQ ID NO: 565 - DNA, 15 bp, synthetic construct
  source 1..15: mol_type = other DNA
atattcctttggatg

SEQ ID NO: 566 - DNA, 15 bp, synthetic construct
  source 1..15: mol_type = other DNA
catcacaagcagaaa

SEQ ID NO: 567 - DNA, 15 bp, synthetic construct
  source 1..15: mol_type = other DNA
ctcagaatcaggact

SEQ ID NO: 568 - DNA, 15 bp, synthetic construct
  source 1..15: mol_type = other DNA
cctgcatctgcaatc

SEQ ID NO: 569 - DNA, 15 bp, synthetic construct
  source 1..15: mol_type = other DNA
ctgctgtaacattca

SEQ ID NO: 570 - DNA, 15 bp, synthetic construct
  source 1..15: mol_type = other DNA
cttgtgttctggtgt

SEQ ID NO: 571 - DNA, 15 bp, synthetic construct
  source 1..15: mol_type = other DNA
aggacagggacaatc

SEQ ID NO: 572 - DNA, 15 bp, synthetic construct
  source 1..15: mol_type = other DNA
catcattctcatggt

SEQ ID NO: 573 - DNA, 15 bp, synthetic construct
  source 1..15: mol_type = other DNA
ctccctgctctcttc

SEQ ID NO: 574 - DNA, 15 bp, synthetic construct
  source 1..15: mol_type = other DNA
tttgtgcttccttgt

SEQ ID NO: 575 - DNA, 15 bp, synthetic construct
  source 1..15: mol_type = other DNA
ctctctagacccaac

SEQ ID NO: 576 - DNA, 15 bp, synthetic construct
  source 1..15: mol_type = other DNA
atcccagtaattggt

SEQ ID NO: 577 - DNA, 15 bp, synthetic construct
  source 1..15: mol_type = other DNA
aacagacacttcaca

SEQ ID NO: 578 - DNA, 15 bp, synthetic construct
  source 1..15: mol_type = other DNA
gtgagagacattttc

SEQ ID NO: 579 - DNA, 15 bp, synthetic construct
  source 1..15: mol_type = other DNA
gatatgttcccatag

SEQ ID NO: 580 - DNA, 15 bp, synthetic construct
  source 1..15: mol_type = other DNA
tgtgtatgtgtcaac

SEQ ID NO: 581 - DNA, 15 bp, synthetic construct
  source 1..15: mol_type = other DNA
tcactgcagtcatct

SEQ ID NO: 582 - DNA, 15 bp, synthetic construct
  source 1..15: mol_type = other DNA
caaaagtaatttccc

SEQ ID NO: 583 - DNA, 15 bp, synthetic construct
  source 1..15: mol_type = other DNA
cctctggttaccaat

SEQ ID NO: 584 - DNA, 15 bp, synthetic construct
  source 1..15: mol_type = other DNA
acagagcaggtcgtt

SEQ ID NO: 585 - DNA, 15 bp, synthetic construct
  source 1..15: mol_type = other DNA
gcttcctaaaaacag

SEQ ID NO: 586 - DNA, 15 bp, synthetic construct
  source 1..15: mol_type = other DNA
ctgcctggttcctac

SEQ ID NO: 587 - DNA, 15 bp, synthetic construct
  source 1..15: mol_type = other DNA
actggcctgtgaagc

SEQ ID NO: 588 - DNA, 15 bp, synthetic construct
  source 1..15: mol_type = other DNA
aatggacggatgcct

SEQ ID NO: 589 - DNA, 15 bp, synthetic construct
  source 1..15: mol_type = other DNA
cctggaatgtcacac

SEQ ID NO: 590 - DNA, 15 bp, synthetic construct
  source 1..15: mol_type = other DNA
ttttgttatccttcc

SEQ ID NO: 591 - DNA, 15 bp, synthetic construct
  source 1..15: mol_type = other DNA
aaaggtatctgctga

SEQ ID NO: 592 - DNA, 15 bp, synthetic construct
  source 1..15: mol_type = other DNA
catctcatccatgct

SEQ ID NO: 593 - DNA, 15 bp, synthetic construct
  source 1..15: mol_type = other DNA
actcataggtatccc

SEQ ID NO: 594 - DNA, 15 bp, synthetic construct
  source 1..15: mol_type = other DNA
actcttctcttttcc

SEQ ID NO: 595 - DNA, 15 bp, synthetic construct
  source 1..15: mol_type = other DNA
ggttcatagccatct

SEQ ID NO: 596 - DNA, 15 bp, synthetic construct
  source 1..15: mol_type = other DNA
atgtaacagctggag

SEQ ID NO: 597 - DNA, 15 bp, synthetic construct
  source 1..15: mol_type = other DNA
gcctggccttcccac

SEQ ID NO: 598 - DNA, 15 bp, synthetic construct
  source 1..15: mol_type = other DNA
gcctgagcctttgaa

SEQ ID NO: 599 - DNA, 15 bp, synthetic construct
  source 1..15: mol_type = other DNA
ctgcctgtccggaag

SEQ ID NO: 600 - DNA, 15 bp, synthetic construct
  source 1..15: mol_type = other DNA
gaagccgcagtaaga

SEQ ID NO: 601 - DNA, 15 bp, synthetic construct
  source 1..15: mol_type = other DNA
ccggcccgatggagc

SEQ ID NO: 602 - DNA, 15 bp, synthetic construct
  source 1..15: mol_type = other DNA
gaggcagtcccaata

SEQ ID NO: 603 - DNA, 15 bp, synthetic construct
  source 1..15: mol_type = other DNA
aaactcttagaacat

SEQ ID NO: 604 - DNA, 15 bp, synthetic construct
  source 1..15: mol_type = other DNA
ccagaatgagttata

SEQ ID NO: 605 - DNA, 15 bp, synthetic construct
  source 1..15: mol_type = other DNA
gatatgcggaagttc

SEQ ID NO: 606 - DNA, 15 bp, synthetic construct
  source 1..15: mol_type = other DNA
tgtacctctgcattt

SEQ ID NO: 607 - DNA, 15 bp, synthetic construct
  source 1..15: mol_type = other DNA
tgtgttccagactat

SEQ ID NO: 608 - DNA, 15 bp, synthetic construct
  source 1..15: mol_type = other DNA
atcagctcaaagttt

SEQ ID NO: 609 - DNA, 15 bp, synthetic construct
  source 1..15: mol_type = other DNA
cacatggatctagta

SEQ ID NO: 610 - DNA, 15 bp, synthetic construct
  source 1..15: mol_type = other DNA
tcaacaaaacttaaa

SEQ ID NO: 611 - DNA, 15 bp, synthetic construct
  source 1..15: mol_type = other DNA
agaaattattctcag

SEQ ID NO: 612 - DNA, 15 bp, synthetic construct
  source 1..15: mol_type = other DNA
acgtgaaggaaagac

SEQ ID NO: 613 - DNA, 15 bp, synthetic construct
  source 1..15: mol_type = other DNA
ctgaaagcttgggtt

SEQ ID NO: 614 - DNA, 15 bp, synthetic construct
  source 1..15: mol_type = other DNA
tgggaaacatctgta

SEQ ID NO: 615 - DNA, 15 bp, synthetic construct
  source 1..15: mol_type = other DNA
ctctctctgtgtggg

SEQ ID NO: 616 - DNA, 15 bp, synthetic construct
  source 1..15: mol_type = other DNA
actcagattctttct

SEQ ID NO: 617 - DNA, 15 bp, synthetic construct
  source 1..15: mol_type = other DNA
gggagattttattca

SEQ ID NO: 618 - DNA, 15 bp, synthetic construct
  source 1..15: mol_type = other DNA
agagaggcatgaaca

SEQ ID NO: 619 - DNA, 15 bp, synthetic construct
  source 1..15: mol_type = other DNA
agggttcattgcctt

SEQ ID NO: 620 - DNA, 15 bp, synthetic construct
  source 1..15: mol_type = other DNA
ggacaagtgccctct

SEQ ID NO: 621 - DNA, 15 bp, synthetic construct
  source 1..15: mol_type = other DNA
actcagggttttggt

SEQ ID NO: 622 - DNA, 15 bp, synthetic construct
  source 1..15: mol_type = other DNA
tatgatttggccaca

SEQ ID NO: 623 - DNA, 15 bp, synthetic construct
  source 1..15: mol_type = other DNA
gggcacattactggg

SEQ ID NO: 624 - DNA, 15 bp, synthetic construct
  source 1..15: mol_type = other DNA
cctgaatcagtgtta

SEQ ID NO: 625 - DNA, 15 bp, synthetic construct
  source 1..15: mol_type = other DNA
ttttgcctgagggaa

SEQ ID NO: 626 - DNA, 15 bp, synthetic construct
  source 1..15: mol_type = other DNA
tttcctttgtaatat

SEQ ID NO: 627 - DNA, 15 bp, synthetic construct
  source 1..15: mol_type = other DNA
tacttgaaaagggtt

SEQ ID NO: 628 - DNA, 15 bp, synthetic construct
  source 1..15: mol_type = other DNA
agagaattaaggaaa

SEQ ID NO: 629 - DNA, 15 bp, synthetic construct
  source 1..15: mol_type = other DNA
ttctagctcctcgtc

SEQ ID NO: 630 - DNA, 15 bp, synthetic construct
  source 1..15: mol_type = other DNA
tcaccaggactatat

SEQ ID NO: 631 - DNA, 15 bp, synthetic construct
  source 1..15: mol_type = other DNA
tatagcacactaccc

SEQ ID NO: 632 - DNA, 15 bp, synthetic construct
  source 1..15: mol_type = other DNA
ttacattctcctcca

SEQ ID NO: 633 - DNA, 15 bp, synthetic construct
  source 1..15: mol_type = other DNA
aatcactgatatcct

SEQ ID NO: 634 - DNA, 15 bp, synthetic construct
  source 1..15: mol_type = other DNA
tgctctaacctccaa

SEQ ID NO: 635 - DNA, 15 bp, synthetic construct
  source 1..15: mol_type = other DNA
atttctctctttgtg

SEQ ID NO: 636 - DNA, 15 bp, synthetic construct
  source 1..15: mol_type = other DNA
gtttggaagaacaac

SEQ ID NO: 637 - DNA, 15 bp, synthetic construct
  source 1..15: mol_type = other DNA
gatggatcttgttct

SEQ ID NO: 638 - DNA, 15 bp, synthetic construct
  source 1..15: mol_type = other DNA
ggtctcactatacaa

SEQ ID NO: 639 - DNA, 15 bp, synthetic construct
  source 1..15: mol_type = other DNA
gttaatttccttttg

SEQ ID NO: 640 - DNA, 15 bp, synthetic construct
  source 1..15: mol_type = other DNA
ttctcgtacctacgc

SEQ ID NO: 641 - DNA, 15 bp, synthetic construct
  source 1..15: mol_type = other DNA
ccagatgctacttcc

SEQ ID NO: 642 - DNA, 15 bp, synthetic construct
  source 1..15: mol_type = other DNA
agagtgaaatgattc

SEQ ID NO: 643 - DNA, 15 bp, synthetic construct
  source 1..15: mol_type = other DNA
tttgtttttctaaat

SEQ ID NO: 644 - DNA, 15 bp, synthetic construct
  source 1..15: mol_type = other DNA
ctgtgtaaccctcac

SEQ ID NO: 645 - DNA, 15 bp, synthetic construct
  source 1..15: mol_type = other DNA
attagtgaacttggt

SEQ ID NO: 646 - DNA, 15 bp, synthetic construct
  source 1..15: mol_type = other DNA
tgtctttttgttatg

SEQ ID NO: 647 - DNA, 15 bp, synthetic construct
  source 1..15: mol_type = other DNA
tggtcatctaatggt

SEQ ID NO: 648 - DNA, 15 bp, synthetic construct
  source 1..15: mol_type = other DNA
gcctttaccgtgcat

SEQ ID NO: 649 - DNA, 15 bp, synthetic construct
  source 1..15: mol_type = other DNA
ggagatagtcaataa

SEQ ID NO: 650 - DNA, 15 bp, synthetic construct
  source 1..15: mol_type = other DNA
tttccctcttgggtt

SEQ ID NO: 651 - DNA, 15 bp, synthetic construct
  source 1..15: mol_type = other DNA
caacagcagcaataa

SEQ ID NO: 652 - DNA, 15 bp, synthetic construct
  source 1..15: mol_type = other DNA
gaggaggaagatgaa

SEQ ID NO: 653 - DNA, 15 bp, synthetic construct
  source 1..15: mol_type = other DNA
agcaagtctgctgtc

SEQ ID NO: 654 - DNA, 15 bp, synthetic construct
  source 1..15: mol_type = other DNA
agtacctctgggtaa

SEQ ID NO: 655 - DNA, 15 bp, synthetic construct
  source 1..15: mol_type = other DNA
aacctgagtggagtg

SEQ ID NO: 656 - DNA, 15 bp, synthetic construct
  source 1..15: mol_type = other DNA
tctctgaattaaccc

SEQ ID NO: 657 - DNA, 15 bp, synthetic construct
  source 1..15: mol_type = other DNA
acccccttcagaatc

SEQ ID NO: 658 - DNA, 15 bp, synthetic construct
  source 1..15: mol_type = other DNA
ctaccatcctatgag

SEQ ID NO: 659 - DNA, 15 bp, synthetic construct
  source 1..15: mol_type = other DNA
gatcggtactgctag

SEQ ID NO: 660 - DNA, 15 bp, synthetic construct
  source 1..15: mol_type = other DNA
tcattgccttggtga

SEQ ID NO: 661 - DNA, 15 bp, synthetic construct
  source 1..15: mol_type = other DNA
gatcggtactgctag

SEQ ID NO: 662 - DNA, 15 bp, synthetic construct
  source 1..15: mol_type = other DNA
tcattgccttggtga

SEQ ID NO: 663 - DNA, 15 bp, synthetic construct
  source 1..15: mol_type = other DNA
ccgtagttctttcgg

SEQ ID NO: 664 - DNA, 15 bp, synthetic construct
  source 1..15: mol_type = other DNA
tgcttttccttttag

SEQ ID NO: 665 - DNA, 15 bp, synthetic construct
  source 1..15: mol_type = other DNA
ccgtagttctttcgg

SEQ ID NO: 666 - DNA, 15 bp, synthetic construct
  source 1..15: mol_type = other DNA
tgcttttccttttag

SEQ ID NO: 667 - DNA, 15 bp, synthetic construct
  source 1..15: mol_type = other DNA
ggaaatggcacatca

SEQ ID NO: 668 - DNA, 15 bp, synthetic construct
  source 1..15: mol_type = other DNA
taccatcaatgtcca

SEQ ID NO: 669 - DNA, 15 bp, synthetic construct
  source 1..15: mol_type = other DNA
ggaaatggcacatca

SEQ ID NO: 670 - DNA, 15 bp, synthetic construct
  source 1..15: mol_type = other DNA
taccatcaatgtcca

SEQ ID NO: 671 - DNA, 15 bp, synthetic construct
  source 1..15: mol_type = other DNA
gaggctgcttccgtt

SEQ ID NO: 672 - DNA, 15 bp, synthetic construct
  source 1..15: mol_type = other DNA
tacagttctgggtgt

SEQ ID NO: 673 - DNA, 15 bp, synthetic construct
  source 1..15: mol_type = other DNA
gtcaattgtaccacc

SEQ ID NO: 674 - DNA, 15 bp, synthetic construct
  source 1..15: mol_type = other DNA
gtttttgcagattta

SEQ ID NO: 675 - DNA, 15 bp, synthetic construct
  source 1..15: mol_type = other DNA
gtcaattgtaccacc

SEQ ID NO: 676 - DNA, 15 bp, synthetic construct
  source 1..15: mol_type = other DNA
gtttttgcagattta

SEQ ID NO: 677 - DNA, 15 bp, synthetic construct
  source 1..15: mol_type = other DNA
tggagaggcccagaa

SEQ ID NO: 678 - DNA, 15 bp, synthetic construct
  source 1..15: mol_type = other DNA
tcacatttcaaacct

SEQ ID NO: 679 - DNA, 15 bp, synthetic construct
  source 1..15: mol_type = other DNA
tggagaggcccagaa

SEQ ID NO: 680 - DNA, 15 bp, synthetic construct
  source 1..15: mol_type = other DNA
tcacatttcaaacct

SEQ ID NO: 681 - DNA, 15 bp, synthetic construct
  source 1..15: mol_type = other DNA
ggccgatactcacca

SEQ ID NO: 682 - DNA, 15 bp, synthetic construct
  source 1..15: mol_type = other DNA
actctgatactccta

SEQ ID NO: 683 - DNA, 15 bp, synthetic construct
  source 1..15: mol_type = other DNA
tgattggaggaggtg

SEQ ID NO: 684 - DNA, 15 bp, synthetic construct
  source 1..15: mol_type = other DNA
ccttgggctccaccg

SEQ ID NO: 685 - DNA, 15 bp, synthetic construct
  source 1..15: mol_type = other DNA
ctggcttgttgtccg

SEQ ID NO: 686 - DNA, 15 bp, synthetic construct
  source 1..15: mol_type = other DNA
ggctacccagagaag

SEQ ID NO: 687 - DNA, 15 bp, synthetic construct
  source 1..15: mol_type = other DNA
acagcattcttctca

SEQ ID NO: 688 - DNA, 15 bp, synthetic construct
  source 1..15: mol_type = other DNA
cctcctggtattatt

SEQ ID NO: 689 - DNA, 15 bp, synthetic construct
  source 1..15: mol_type = other DNA
ccttaacttcatggt

SEQ ID NO: 690 - DNA, 15 bp, synthetic construct
  source 1..15: mol_type = other DNA
gtataaagcggtagg

SEQ ID NO: 691 - DNA, 15 bp, synthetic construct
  source 1..15: mol_type = other DNA
ctctgtccttcgacc

SEQ ID NO: 692 - DNA, 15 bp, synthetic construct
  source 1..15: mol_type = other DNA
ctccgtttccagcga

SEQ ID NO: 693 - DNA, 15 bp, synthetic construct
  source 1..15: mol_type = other DNA
cgcttggcggtctac

SEQ ID NO: 694 - DNA, 15 bp, synthetic construct
  source 1..15: mol_type = other DNA
ccttaaactcctcac

SEQ ID NO: 695 - DNA, 15 bp, synthetic construct
  source 1..15: mol_type = other DNA
ccttgactcagtagc

SEQ ID NO: 696 - DNA, 15 bp, synthetic construct
  source 1..15: mol_type = other DNA
caattccccttgaca

SEQ ID NO: 697 - DNA, 15 bp, synthetic construct
  source 1..15: mol_type = other DNA
tacaggagagcattt

SEQ ID NO: 698 - DNA, 15 bp, synthetic construct
  source 1..15: mol_type = other DNA
tccttagacccactc

SEQ ID NO: 699 - DNA, 15 bp, synthetic construct
  source 1..15: mol_type = other DNA
ctgagatcagatttg

SEQ ID NO: 700 - DNA, 15 bp, synthetic construct
  source 1..15: mol_type = other DNA
caggcacacaatacc

SEQ ID NO: 701 - DNA, 15 bp, synthetic construct
  source 1..15: mol_type = other DNA
ccttctcttaaatct

SEQ ID NO: 702 - DNA, 15 bp, synthetic construct
  source 1..15: mol_type = other DNA
gaagagtgagtgtac

SEQ ID NO: 703 - DNA, 15 bp, synthetic construct
  source 1..15: mol_type = other DNA
gagtagatgtcctga

SEQ ID NO: 704 - DNA, 15 bp, synthetic construct
  source 1..15: mol_type = other DNA
ttcctccttcatggt

SEQ ID NO: 705 - DNA, 15 bp, synthetic construct
  source 1..15: mol_type = other DNA
tcaggatgagatgct

SEQ ID NO: 706 - DNA, 15 bp, synthetic construct
  source 1..15: mol_type = other DNA
tgggagctgagtgct

SEQ ID NO: 707 - DNA, 15 bp, synthetic construct
  source 1..15: mol_type = other DNA
aattctgattttggt

SEQ ID NO: 708 - DNA, 15 bp, synthetic construct
  source 1..15: mol_type = other DNA
tggcagaataagtct

SEQ ID NO: 709 - DNA, 15 bp, synthetic construct
  source 1..15: mol_type = other DNA
gtggagcagtataag

SEQ ID NO: 710 - DNA, 15 bp, synthetic construct
  source 1..15: mol_type = other DNA
agggttaggactgtg

SEQ ID NO: 711 - DNA, 15 bp, synthetic construct
  source 1..15: mol_type = other DNA
gtagcagtgatgccc

SEQ ID NO: 712 - DNA, 15 bp, synthetic construct
  source 1..15: mol_type = other DNA
tccagcctgcatccg

SEQ ID NO: 713 - DNA, 15 bp, synthetic construct
  source 1..15: mol_type = other DNA
caccgacccacgtcc

SEQ ID NO: 714 - DNA, 15 bp, synthetic construct
  source 1..15: mol_type = other DNA
cgtggatctccatgt

SEQ ID NO: 715 - DNA, 15 bp, synthetic construct
  source 1..15: mol_type = other DNA
tctggacatcaagct

SEQ ID NO: 716 - DNA, 15 bp, synthetic construct
  source 1..15: mol_type = other DNA
cgctttttggtgacg

SEQ ID NO: 717 - DNA, 15 bp, synthetic construct
  source 1..15: mol_type = other DNA
tctggacatcaagct

SEQ ID NO: 718 - DNA, 15 bp, synthetic construct
  source 1..15: mol_type = other DNA
cgctttttggtgacg

SEQ ID NO: 719 - DNA, 15 bp, synthetic construct
  source 1..15: mol_type = other DNA
actcatcccagacac

SEQ ID NO: 720 - DNA, 15 bp, synthetic construct
  source 1..15: mol_type = other DNA
ctgtatccccttaga

SEQ ID NO: 721 - DNA, 15 bp, synthetic construct
  source 1..15: mol_type = other DNA
tgtccacagatcatg

SEQ ID NO: 722 - DNA, 15 bp, synthetic construct
  source 1..15: mol_type = other DNA
ggtgggaaccggtaa

SEQ ID NO: 723 - DNA, 15 bp, synthetic construct
  source 1..15: mol_type = other DNA
agatgatcccttgct

SEQ ID NO: 724 - DNA, 15 bp, synthetic construct
  source 1..15: mol_type = other DNA
atgagagccgtacgc

SEQ ID NO: 725 - DNA, 15 bp, synthetic construct
  source 1..15: mol_type = other DNA
agatgatcccttgct

SEQ ID NO: 726 - DNA, 15 bp, synthetic construct
  source 1..15: mol_type = other DNA
atgagagccgtacgc

SEQ ID NO: 727 - DNA, 15 bp, synthetic construct
  source 1..15: mol_type = other DNA
tctcctctccagatc

SEQ ID NO: 728 - DNA, 15 bp, synthetic construct
  source 1..15: mol_type = other DNA
gcaaacttgggttgg

SEQ ID NO: 729 - DNA, 15 bp, synthetic construct
  source 1..15: mol_type = other DNA
ttccttagctccatc

SEQ ID NO: 730 - DNA, 15 bp, synthetic construct
  source 1..15: mol_type = other DNA
atggagcaggtcatc

SEQ ID NO: 731 - DNA, 15 bp, synthetic construct
  source 1..15: mol_type = other DNA
gttgaggacgacgag

SEQ ID NO: 732 - DNA, 15 bp, synthetic construct
  source 1..15: mol_type = other DNA
cctgttcaaggtata

SEQ ID NO: 733 - DNA, 15 bp, synthetic construct
  source 1..15: mol_type = other DNA
tcagtcccagactcg

SEQ ID NO: 734 - DNA, 15 bp, synthetic construct
  source 1..15: mol_type = other DNA
gctgcgagtgaccgt

SEQ ID NO: 735 - DNA, 15 bp, synthetic construct
  source 1..15: mol_type = other DNA
gccgacaaggcatct

SEQ ID NO: 736 - DNA, 15 bp, synthetic construct
  source 1..15: mol_type = other DNA
gcaaggccacctcgt

SEQ ID NO: 737 - DNA, 15 bp, synthetic construct
  source 1..15: mol_type = other DNA
tacctcccttctagg

SEQ ID NO: 738 - DNA, 15 bp, synthetic construct
  source 1..15: mol_type = other DNA
ttctttggcttcaag

SEQ ID NO: 739 - DNA, 15 bp, synthetic construct
  source 1..15: mol_type = other DNA
gattccactacacct

SEQ ID NO: 740 - DNA, 15 bp, synthetic construct
  source 1..15: mol_type = other DNA
tctaaagctagggaa

SEQ ID NO: 741 - DNA, 15 bp, synthetic construct
  source 1..15: mol_type = other DNA
aaggtgagtttgagc

SEQ ID NO: 742 - DNA, 15 bp, synthetic construct
  source 1..15: mol_type = other DNA
aagggctctttagcg

SEQ ID NO: 743 - DNA, 15 bp, synthetic construct
  source 1..15: mol_type = other DNA
gtagtattccttacc

SEQ ID NO: 744 - DNA, 15 bp, synthetic construct
  source 1..15: mol_type = other DNA
tggtaaatacatagc

SEQ ID NO: 745 - DNA, 15 bp, synthetic construct
  source 1..15: mol_type = other DNA
aacttggtcaaaaag

SEQ ID NO: 746 - DNA, 15 bp, synthetic construct
  source 1..15: mol_type = other DNA
ttattctacccctta

SEQ ID NO: 747 - DNA, 15 bp, synthetic construct
  source 1..15: mol_type = other DNA
ggactggtctcatct

SEQ ID NO: 748 - DNA, 15 bp, synthetic construct
  source 1..15: mol_type = other DNA
tcatgatccgagttg

SEQ ID NO: 749 - DNA, 15 bp, synthetic construct
  source 1..15: mol_type = other DNA
ggcttttgcgcatat

SEQ ID NO: 750 - DNA, 15 bp, synthetic construct
  source 1..15: mol_type = other DNA
tgaatcccaaaccac

SEQ ID NO: 751 - DNA, 15 bp, synthetic construct
  source 1..15: mol_type = other DNA
tgatgtagcggaagc

SEQ ID NO: 752 - DNA, 15 bp, synthetic construct
  source 1..15: mol_type = other DNA
cctcaaggacctgtg

SEQ ID NO: 753 - DNA, 15 bp, synthetic construct
  source 1..15: mol_type = other DNA
agaagcttgtagcgc

SEQ ID NO: 754 - DNA, 15 bp, synthetic construct
  source 1..15: mol_type = other DNA
cagctggatttctac

SEQ ID NO: 755 - DNA, 15 bp, synthetic construct
  source 1..15: mol_type = other DNA
gaaggataaaaagcc

SEQ ID NO: 756 - DNA, 15 bp, synthetic construct
  source 1..15: mol_type = other DNA
tctgtgatggtcata

SEQ ID NO: 757 - DNA, 15 bp, synthetic construct
  source 1..15: mol_type = other DNA
ttggagacattttac

SEQ ID NO: 758 - DNA, 15 bp, synthetic construct
  source 1..15: mol_type = other DNA
gcgattacactttcg

SEQ ID NO: 759 - DNA, 15 bp, synthetic construct
  source 1..15: mol_type = other DNA
agtttgatcttgaga

SEQ ID NO: 760 - DNA, 15 bp, synthetic construct
  source 1..15: mol_type = other DNA
tatgaggtcaacctt

SEQ ID NO: 761 - DNA, 15 bp, synthetic construct
  source 1..15: mol_type = other DNA
taacgctcccttccc

SEQ ID NO: 762 - DNA, 15 bp, synthetic construct
  source 1..15: mol_type = other DNA
ctccgtatggtagat

SEQ ID NO: 763 - DNA, 15 bp, synthetic construct
  source 1..15: mol_type = other DNA
tcagattacagagcc

SEQ ID NO: 764 - DNA, 15 bp, synthetic construct
  source 1..15: mol_type = other DNA
agttgagaccaggac

SEQ ID NO: 765 - DNA, 15 bp, synthetic construct
  source 1..15: mol_type = other DNA
ctaatgtcatagact

SEQ ID NO: 766 - DNA, 15 bp, synthetic construct
  source 1..15: mol_type = other DNA
cagaaatcgggaacg

SEQ ID NO: 767 - DNA, 15 bp, synthetic construct
  source 1..15: mol_type = other DNA
agcggatggtcagca

SEQ ID NO: 768 - DNA, 15 bp, synthetic construct
  source 1..15: mol_type = other DNA
gtctcgcagaaccat

SEQ ID NO: 769 - DNA, 15 bp, synthetic construct
  source 1..15: mol_type = other DNA
tgttattatttcctt

SEQ ID NO: 770 - DNA, 15 bp, synthetic construct
  source 1..15: mol_type = other DNA
tccagtaaagcaaga

SEQ ID NO: 771 - DNA, 15 bp, synthetic construct
  source 1..15: mol_type = other DNA
aggatgaaatgtgaa

SEQ ID NO: 772 - DNA, 15 bp, synthetic construct
  source 1..15: mol_type = other DNA
agaacaattccttcc

SEQ ID NO: 773 - DNA, 15 bp, synthetic construct
  source 1..15: mol_type = other DNA
ctcttggctgttagt

SEQ ID NO: 774 - DNA, 15 bp, synthetic construct
  source 1..15: mol_type = other DNA
agtccaatacaactg

SEQ ID NO: 775 - DNA, 15 bp, synthetic construct
  source 1..15: mol_type = other DNA
ctgcctcccttttcc

SEQ ID NO: 776 - DNA, 15 bp, synthetic construct
  source 1..15: mol_type = other DNA
taagccctactaagt

SEQ ID NO: 777 - DNA, 15 bp, synthetic construct
  source 1..15: mol_type = other DNA
cacccaatctcagag

SEQ ID NO: 778 - DNA, 15 bp, synthetic construct
  source 1..15: mol_type = other DNA
gtttgctgattgctt

SEQ ID NO: 779 - DNA, 15 bp, synthetic construct
  source 1..15: mol_type = other DNA
atgtggcctgaataa

SEQ ID NO: 780 - DNA, 15 bp, synthetic construct
  source 1..15: mol_type = other DNA
tgttctcctgcttcg

SEQ ID NO: 781 - DNA, 15 bp, synthetic construct
  source 1..15: mol_type = other DNA
ggaacctggagtggg

SEQ ID NO: 782 - DNA, 15 bp, synthetic construct
  source 1..15: mol_type = other DNA
ggaatcatggtactc

SEQ ID NO: 783 - DNA, 15 bp, synthetic construct
  source 1..15: mol_type = other DNA
tgattgtccacggta

SEQ ID NO: 784 - DNA, 15 bp, synthetic construct
  source 1..15: mol_type = other DNA
ccaaagatgttttgc

SEQ ID NO: 785 - DNA, 15 bp, synthetic construct
  source 1..15: mol_type = other DNA
taaccaggcagtagg

SEQ ID NO: 786 - DNA, 15 bp, synthetic construct
  source 1..15: mol_type = other DNA
ctggtggctcaaaat

SEQ ID NO: 787 - DNA, 15 bp, synthetic construct
  source 1..15: mol_type = other DNA
ctagctgatgataca

SEQ ID NO: 788 - DNA, 15 bp, synthetic construct
  source 1..15: mol_type = other DNA
aggacccctgtttaa

SEQ ID NO: 789 - DNA, 15 bp, synthetic construct
  source 1..15: mol_type = other DNA
caaaaacttctatta

SEQ ID NO: 790 - DNA, 15 bp, synthetic construct
  source 1..15: mol_type = other DNA
caagaagaaccatga

SEQ ID NO: 791 - DNA, 15 bp, synthetic construct
  source 1..15: mol_type = other DNA
ggtgaagaacttgcc

SEQ ID NO: 792 - DNA, 15 bp, synthetic construct
  source 1..15: mol_type = other DNA
acacacttccagaga

SEQ ID NO: 793 - DNA, 15 bp, synthetic construct
  source 1..15: mol_type = other DNA
tccttgggattcaac

SEQ ID NO: 794 - DNA, 15 bp, synthetic construct
  source 1..15: mol_type = other DNA
tcaactgagagtgac

SEQ ID NO: 795 - DNA, 15 bp, synthetic construct
  source 1..15: mol_type = other DNA
aagttcttttacatc

SEQ ID NO: 796 - DNA, 15 bp, synthetic construct
  source 1..15: mol_type = other DNA
acaatatccaccact

SEQ ID NO: 797 - DNA, 15 bp, synthetic construct
  source 1..15: mol_type = other DNA
gttgaacccagaata

SEQ ID NO: 798 - DNA, 15 bp, synthetic construct
  source 1..15: mol_type = other DNA
ttgagttaggtaagg

SEQ ID NO: 799 - DNA, 15 bp, synthetic construct
  source 1..15: mol_type = other DNA
tcggttgggattctg

SEQ ID NO: 800 - DNA, 15 bp, synthetic construct
  source 1..15: mol_type = other DNA
gtcatggccatggag

SEQ ID NO: 801 - DNA, 15 bp, synthetic construct
  source 1..15: mol_type = other DNA
tcggttgggattctg

SEQ ID NO: 802 - DNA, 15 bp, synthetic construct
  source 1..15: mol_type = other DNA
gtcatggccatggag

SEQ ID NO: 803 - DNA, 15 bp, synthetic construct
  source 1..15: mol_type = other DNA
cattatgagcttgtt

SEQ ID NO: 804 - DNA, 15 bp, synthetic construct
  source 1..15: mol_type = other DNA
actggcagacattga

SEQ ID NO: 805 - DNA, 15 bp, synthetic construct
  source 1..15: mol_type = other DNA
actaggcttttcttc

SEQ ID NO: 806 - DNA, 15 bp, synthetic construct
  source 1..15: mol_type = other DNA
gttccatttgtgttt

SEQ ID NO: 807 - DNA, 15 bp, synthetic construct
  source 1..15: mol_type = other DNA
gattatgtgtaggcc

SEQ ID NO: 808 - DNA, 15 bp, synthetic construct
  source 1..15: mol_type = other DNA
aggtctgtttcaata

SEQ ID NO: 809 - DNA, 15 bp, synthetic construct
  source 1..15: mol_type = other DNA
attcggttgaggagc

SEQ ID NO: 810 - DNA, 15 bp, synthetic construct
  source 1..15: mol_type = other DNA
cttcatgcatatatc

SEQ ID NO: 811 - DNA, 15 bp, synthetic construct
  source 1..15: mol_type = other DNA
tatggaaaggcctaa

SEQ ID NO: 812 - DNA, 15 bp, synthetic construct
  source 1..15: mol_type = other DNA
tacttcagtagagtc

SEQ ID NO: 813 - DNA, 15 bp, synthetic construct
  source 1..15: mol_type = other DNA
tatgaattgtctcta

SEQ ID NO: 814 - DNA, 15 bp, synthetic construct
  source 1..15: mol_type = other DNA
ctttgaccacgtttt

SEQ ID NO: 815 - DNA, 15 bp, synthetic construct
  source 1..15: mol_type = other DNA
gacaatctctaggat

SEQ ID NO: 816 - DNA, 15 bp, synthetic construct
  source 1..15: mol_type = other DNA
atattttaatatcaa

SEQ ID NO: 817 - DNA, 15 bp, synthetic construct
  source 1..15: mol_type = other DNA
caccatgcatacccc

SEQ ID NO: 818 - DNA, 15 bp, synthetic construct
  source 1..15: mol_type = other DNA
agaacatttcaatga

SEQ ID NO: 819 - DNA, 15 bp, synthetic construct
  source 1..15: mol_type = other DNA
ccaagaacagttagg

SEQ ID NO: 820 - DNA, 15 bp, synthetic construct
  source 1..15: mol_type = other DNA
gcagaaaacagccta

SEQ ID NO: 821 - DNA, 15 bp, synthetic construct
  source 1..15: mol_type = other DNA
tcttctaaaaagcgg

SEQ ID NO: 822 - DNA, 15 bp, synthetic construct
  source 1..15: mol_type = other DNA
acccatctagatcaa

SEQ ID NO: 823 - DNA, 15 bp, synthetic construct
  source 1..15: mol_type = other DNA
ccttctacctaacat

SEQ ID NO: 824 - DNA, 15 bp, synthetic construct
  source 1..15: mol_type = other DNA
gattctcccctgttg

SEQ ID NO: 825 - DNA, 15 bp, synthetic construct
  source 1..15: mol_type = other DNA
tccactagggttgcc

SEQ ID NO: 826 - DNA, 15 bp, synthetic construct
  source 1..15: mol_type = other DNA
ctgctctatattaaa

SEQ ID NO: 827 - DNA, 15 bp, synthetic construct
  source 1..15: mol_type = other DNA
tgtgtgcctggctaa

SEQ ID NO: 828 - DNA, 15 bp, synthetic construct
  source 1..15: mol_type = other DNA
actctccatagtgat

SEQ ID NO: 829 - DNA, 15 bp, synthetic construct
  source 1..15: mol_type = other DNA
ttaccttttaatgac

SEQ ID NO: 830 - DNA, 15 bp, synthetic construct
  source 1..15: mol_type = other DNA
aatatacatctctgc

SEQ ID NO: 831 - DNA, 15 bp, synthetic construct
  source 1..15: mol_type = other DNA
tctgaatgaagactt

SEQ ID NO: 832 - DNA, 15 bp, synthetic construct
  source 1..15: mol_type = other DNA
aacagattgccttgt

SEQ ID NO: 833 - DNA, 15 bp, synthetic construct
  source 1..15: mol_type = other DNA
catactaagaaatct

SEQ ID NO: 834 - DNA, 15 bp, synthetic construct
  source 1..15: mol_type = other DNA
attatgtccctgtgt

SEQ ID NO: 835 - DNA, 15 bp, synthetic construct
  source 1..15: mol_type = other DNA
tgttctttattacgg

SEQ ID NO: 836 - DNA, 15 bp, synthetic construct
  source 1..15: mol_type = other DNA
atacatatgcatacc

SEQ ID NO: 837 - DNA, 15 bp, synthetic construct
  source 1..15: mol_type = other DNA
ggacaaagccttcac

SEQ ID NO: 838 - DNA, 15 bp, synthetic construct
  source 1..15: mol_type = other DNA
ctattttcccatact

SEQ ID NO: 839 - DNA, 15 bp, synthetic construct
  source 1..15: mol_type = other DNA
tgcagaagtataata

SEQ ID NO: 840 - DNA, 15 bp, synthetic construct
  source 1..15: mol_type = other DNA
cttgattttctcaca

SEQ ID NO: 841 - DNA, 15 bp, synthetic construct
  source 1..15: mol_type = other DNA
aatcattccaagaca

SEQ ID NO: 842 - DNA, 15 bp, synthetic construct
  source 1..15: mol_type = other DNA
tctatgtgacttttt

SEQ ID NO: 843 - DNA, 15 bp, synthetic construct
  source 1..15: mol_type = other DNA
tcctggtgtattgct

SEQ ID NO: 844 - DNA, 15 bp, synthetic construct
  source 1..15: mol_type = other DNA
ttgaatctagcatct

SEQ ID NO: 845 - DNA, 15 bp, synthetic construct
  source 1..15: mol_type = other DNA
ccatgccatagtgtc

SEQ ID NO: 846 - DNA, 15 bp, synthetic construct
  source 1..15: mol_type = other DNA
gaaagttatgaaagg

SEQ ID NO: 847 - DNA, 15 bp, synthetic construct
  source 1..15: mol_type = other DNA
gctccacactcacac

SEQ ID NO: 848 - DNA, 15 bp, synthetic construct
  source 1..15: mol_type = other DNA
atgcctgttatttcc

SEQ ID NO: 849 - DNA, 15 bp, synthetic construct
  source 1..15: mol_type = other DNA
taaagtttctgaggg

SEQ ID NO: 850 - DNA, 15 bp, synthetic construct
  source 1..15: mol_type = other DNA
tctacgctcattatc

SEQ ID NO: 851 - DNA, 15 bp, synthetic construct
  source 1..15: mol_type = other DNA
ttatgcctcaaaagg

SEQ ID NO: 852 - DNA, 15 bp, synthetic construct
  source 1..15: mol_type = other DNA
cagtccagtttaaag

SEQ ID NO: 853 - DNA, 15 bp, synthetic construct
  source 1..15: mol_type = other DNA
atgtgcttgtccatg

SEQ ID NO: 854 - DNA, 15 bp, synthetic construct
  source 1..15: mol_type = other DNA
aacaaacagcttcag

SEQ ID NO: 855 - DNA, 15 bp, synthetic construct
  source 1..15: mol_type = other DNA
atttggccttggaag

SEQ ID NO: 856 - DNA, 15 bp, synthetic construct
  source 1..15: mol_type = other DNA
gatttcgggtatgag

SEQ ID NO: 857 - DNA, 15 bp, synthetic construct
  source 1..15: mol_type = other DNA
ccagtaaattcaatt

SEQ ID NO: 858 - DNA, 15 bp, synthetic construct
  source 1..15: mol_type = other DNA
tcctgacaactgtaa

SEQ ID NO: 859 - DNA, 15 bp, synthetic construct
  source 1..15: mol_type = other DNA
aagctgtcggcattg

SEQ ID NO: 860 - DNA, 15 bp, synthetic construct
  source 1..15: mol_type = other DNA
ctctttctgctaaga

SEQ ID NO: 861 - DNA, 15 bp, synthetic construct
  source 1..15: mol_type = other DNA
gtagcagcatcacac

SEQ ID NO: 862 - DNA, 15 bp, synthetic construct
  source 1..15: mol_type = other DNA
gcaaacctattcctt

SEQ ID NO: 863 - DNA, 15 bp, synthetic construct
  source 1..15: mol_type = other DNA
acattctgattgtcc

SEQ ID NO: 864 - DNA, 15 bp, synthetic construct
  source 1..15: mol_type = other DNA
ctgaaaaacattatc

SEQ ID NO: 865 - DNA, 15 bp, synthetic construct
  source 1..15: mol_type = other DNA
cttacctatcttgac

SEQ ID NO: 866 - DNA, 15 bp, synthetic construct
  source 1..15: mol_type = other DNA
ggaatgcttgatgag

SEQ ID NO: 867 - DNA, 15 bp, synthetic construct
  source 1..15: mol_type = other DNA
ttaccccttctatct

SEQ ID NO: 868 - DNA, 15 bp, synthetic construct
  source 1..15: mol_type = other DNA
cacttgaggaaacag

SEQ ID NO: 869 - DNA, 15 bp, synthetic construct
  source 1..15: mol_type = other DNA
agcaattgtactcta

SEQ ID NO: 870 - DNA, 15 bp, synthetic construct
  source 1..15: mol_type = other DNA
ctggctctgtttgat

SEQ ID NO: 871 - DNA, 15 bp, synthetic construct
  source 1..15: mol_type = other DNA
tgcatgtgaattccc

SEQ ID NO: 872 - DNA, 15 bp, synthetic construct
  source 1..15: mol_type = other DNA
ctgtcaccataaaat

SEQ ID NO: 873 - DNA, 15 bp, synthetic construct
  source 1..15: mol_type = other DNA
ttgaaggaaatgccc

SEQ ID NO: 874 - DNA, 15 bp, synthetic construct
  source 1..15: mol_type = other DNA
gactacttctaatct

SEQ ID NO: 875 - DNA, 15 bp, synthetic construct
  source 1..15: mol_type = other DNA
acattatgccccatc

SEQ ID NO: 876 - DNA, 15 bp, synthetic construct
  source 1..15: mol_type = other DNA
ttcgatacctccaca

SEQ ID NO: 877 - DNA, 15 bp, synthetic construct
  source 1..15: mol_type = other DNA
aggtaaaaccacagt

SEQ ID NO: 878 - DNA, 15 bp, synthetic construct
  source 1..15: mol_type = other DNA
gaatgaagaacaatc

SEQ ID NO: 879 - DNA, 15 bp, synthetic construct
  source 1..15: mol_type = other DNA
tggacagtaaggaag

SEQ ID NO: 880 - DNA, 15 bp, synthetic construct
  source 1..15: mol_type = other DNA
acagcagtagagagg

SEQ ID NO: 881 - DNA, 15 bp, synthetic construct
  source 1..15: mol_type = other DNA
tagtactcagtgaaa

SEQ ID NO: 882 - DNA, 15 bp, synthetic construct
  source 1..15: mol_type = other DNA
gttccttagtacaga

SEQ ID NO: 883 - DNA, 15 bp, synthetic construct
  source 1..15: mol_type = other DNA
aactagctatgagct

SEQ ID NO: 884 - DNA, 15 bp, synthetic construct
  source 1..15: mol_type = other DNA
tcttgctcatgtatc

SEQ ID NO: 885 - DNA, 15 bp, synthetic construct
  source 1..15: mol_type = other DNA
ttcatagtggtttgc

SEQ ID NO: 886 - DNA, 15 bp, synthetic construct
  source 1..15: mol_type = other DNA
aggccaactccattt

SEQ ID NO: 887 - DNA, 15 bp, synthetic construct
  source 1..15: mol_type = other DNA
tagaccatggaaaat

SEQ ID NO: 888 - DNA, 15 bp, synthetic construct
  source 1..15: mol_type = other DNA
caatggtctgtaatt

SEQ ID NO: 889 - DNA, 15 bp, synthetic construct
  source 1..15: mol_type = other DNA
tacaaatctgcatgg

SEQ ID NO: 890 - DNA, 15 bp, synthetic construct
  source 1..15: mol_type = other DNA
tatgccaaggccttt

SEQ ID NO: 891 - DNA, 15 bp, synthetic construct
  source 1..15: mol_type = other DNA
accagaaaacagaag

SEQ ID NO: 892 - DNA, 15 bp, synthetic construct
  source 1..15: mol_type = other DNA
atgctagtcagtgaa

SEQ ID NO: 893 - DNA, 15 bp, synthetic construct
  source 1..15: mol_type = other DNA
gctcaccatagcagg

SEQ ID NO: 894 - DNA, 15 bp, synthetic construct
  source 1..15: mol_type = other DNA
ggtggtggacgtgga

SEQ ID NO: 895 - DNA, 15 bp, synthetic construct
  source 1..15: mol_type = other DNA
gctcgctctccaaca

SEQ ID NO: 896 - DNA, 15 bp, synthetic construct
  source 1..15: mol_type = other DNA
gaggatggagaggag

SEQ ID NO: 897 - DNA, 15 bp, synthetic construct
  source 1..15: mol_type = other DNA
tcctctcggcctttg

SEQ ID NO: 898 - DNA, 15 bp, synthetic construct
  source 1..15: mol_type = other DNA
actccacagggactg

SEQ ID NO: 899 - DNA, 15 bp, synthetic construct
  source 1..15: mol_type = other DNA
gaggacggctgttag

SEQ ID NO: 900 - DNA, 15 bp, synthetic construct
  source 1..15: mol_type = other DNA
tctggatgttgtact

SEQ ID NO: 901 - DNA, 15 bp, synthetic construct
  source 1..15: mol_type = other DNA
gcggacgtgcttagc

SEQ ID NO: 902 - DNA, 15 bp, synthetic construct
  source 1..15: mol_type = other DNA
ttttccccgaacacc

SEQ ID NO: 903 - DNA, 15 bp, synthetic construct
  source 1..15: mol_type = other DNA
agcctgaagagttga

SEQ ID NO: 904 - DNA, 15 bp, synthetic construct
  source 1..15: mol_type = other DNA
ctacttacagctgca

SEQ ID NO: 905 - DNA, 15 bp, synthetic construct
  source 1..15: mol_type = other DNA
ctgtttatgtccgac

SEQ ID NO: 906 - DNA, 15 bp, synthetic construct
  source 1..15: mol_type = other DNA
tttaacaacaacaaa

SEQ ID NO: 907 - DNA, 15 bp, synthetic construct
  source 1..15: mol_type = other DNA
aggttcttttagcct

SEQ ID NO: 908 - DNA, 15 bp, synthetic construct
  source 1..15: mol_type = other DNA
agatcttttcgatca

SEQ ID NO: 909 - DNA, 15 bp, synthetic construct
  source 1..15: mol_type = other DNA
aaaatattcctgtgg

SEQ ID NO: 910 - DNA, 15 bp, synthetic construct
  source 1..15: mol_type = other DNA
aagactgggaacaat

SEQ ID NO: 911 - DNA, 15 bp, synthetic construct
  source 1..15: mol_type = other DNA
gctttaaaactgaat

SEQ ID NO: 912 - DNA, 15 bp, synthetic construct
  source 1..15: mol_type = other DNA
tttggaatgggcttc

SEQ ID NO: 913 - DNA, 15 bp, synthetic construct
  source 1..15: mol_type = other DNA
taggtcttcagcgat

SEQ ID NO: 914 - DNA, 15 bp, synthetic construct
  source 1..15: mol_type = other DNA
ctcaggttactgcaa

SEQ ID NO: 915 - DNA, 15 bp, synthetic construct
  source 1..15: mol_type = other DNA
taggtcttcagcgat

SEQ ID NO: 916 - DNA, 15 bp, synthetic construct
  source 1..15: mol_type = other DNA
ctcaggttactgcaa

SEQ ID NO: 917 - DNA, 15 bp, synthetic construct
  source 1..15: mol_type = other DNA
gttacatgtagcgtt

SEQ ID NO: 918 - DNA, 15 bp, synthetic construct
  source 1..15: mol_type = other DNA
aatgtggagagcatt

SEQ ID NO: 919 - DNA, 15 bp, synthetic construct
  source 1..15: mol_type = other DNA
tgtttttaccagaaa

SEQ ID NO: 920 - DNA, 15 bp, synthetic construct
  source 1..15: mol_type = other DNA
tcacatctacctcag

SEQ ID NO: 921 - DNA, 15 bp, synthetic construct
  source 1..15: mol_type = other DNA
cttaaacagaggagt

SEQ ID NO: 922 - DNA, 15 bp, synthetic construct
  source 1..15: mol_type = other DNA
aaagtttaaccaatt

SEQ ID NO: 923 - DNA, 15 bp, synthetic construct
  source 1..15: mol_type = other DNA
gaagaatcgatagta

SEQ ID NO: 924 - DNA, 15 bp, synthetic construct
  source 1..15: mol_type = other DNA
ataagtggcaacttc

SEQ ID NO: 925 - DNA, 15 bp, synthetic construct
  source 1..15: mol_type = other DNA
aaataagtgacattt

SEQ ID NO: 926 - DNA, 15 bp, synthetic construct
  source 1..15: mol_type = other DNA
acatcaggccacact

SEQ ID NO: 927 - DNA, 15 bp, synthetic construct
  source 1..15: mol_type = other DNA
tattgaaccatcaca

SEQ ID NO: 928 - DNA, 15 bp, synthetic construct
  source 1..15: mol_type = other DNA
acatgtgctactcac

SEQ ID NO: 929 - DNA, 15 bp, synthetic construct
  source 1..15: mol_type = other DNA
tgagtgagaaaaaca

SEQ ID NO: 930 - DNA, 15 bp, synthetic construct
  source 1..15: mol_type = other DNA
cattatacgcatact

SEQ ID NO: 931 - DNA, 15 bp, synthetic construct
  source 1..15: mol_type = other DNA
agttagtcatatggg

SEQ ID NO: 932 - DNA, 15 bp, synthetic construct
  source 1..15: mol_type = other DNA
aagaaaattatcagg

SEQ ID NO: 933 - DNA, 15 bp, synthetic construct
  source 1..15: mol_type = other DNA
taattttcttgtgca

SEQ ID NO: 934 - DNA, 15 bp, synthetic construct
  source 1..15: mol_type = other DNA
ggaattatgataatg

SEQ ID NO: 935 - DNA, 15 bp, synthetic construct
  source 1..15: mol_type = other DNA
ctttataggatctcg

SEQ ID NO: 936 - DNA, 15 bp, synthetic construct
  source 1..15: mol_type = other DNA
tatcctacgtacagg

SEQ ID NO: 937 - DNA, 15 bp, synthetic construct
  source 1..15: mol_type = other DNA
cacgtggaatacatt

SEQ ID NO: 938 - DNA, 15 bp, synthetic construct
  source 1..15: mol_type = other DNA
tgggttcaacacctg

SEQ ID NO: 939 - DNA, 15 bp, synthetic construct
  source 1..15: mol_type = other DNA
atagtagctaaagct

SEQ ID NO: 940 - DNA, 15 bp, synthetic construct
  source 1..15: mol_type = other DNA
tatatgactgtttct

SEQ ID NO: 941 - DNA, 15 bp, synthetic construct
  source 1..15: mol_type = other DNA
ttttagtgtccagtg

SEQ ID NO: 942 - DNA, 15 bp, synthetic construct
  source 1..15: mol_type = other DNA
agacgaacttcatca

SEQ ID NO: 943 - DNA, 15 bp, synthetic construct
  source 1..15: mol_type = other DNA
tagttaaagccttcc

SEQ ID NO: 944 - DNA, 15 bp, synthetic construct
  source 1..15: mol_type = other DNA
caactctatggaact

SEQ ID NO: 945 - DNA, 15 bp, synthetic construct
  source 1..15: mol_type = other DNA
tttttacatgcatta

SEQ ID NO: 946 - DNA, 15 bp, synthetic construct
  source 1..15: mol_type = other DNA
accttcttcattttt

SEQ ID NO: 947 - DNA, 15 bp, synthetic construct
  source 1..15: mol_type = other DNA
tgataggcggagcat

SEQ ID NO: 948 - DNA, 15 bp, synthetic construct
  source 1..15: mol_type = other DNA
aagcatcattagcaa

SEQ ID NO: 949 - DNA, 15 bp, synthetic construct
  source 1..15: mol_type = other DNA
ctgtctaggcatttt

SEQ ID NO: 950 - DNA, 15 bp, synthetic construct
  source 1..15: mol_type = other DNA
caacccattctccct

SEQ ID NO: 951 - DNA, 15 bp, synthetic construct
  source 1..15: mol_type = other DNA
gacaggttcctggtc

SEQ ID NO: 952 - DNA, 15 bp, synthetic construct
  source 1..15: mol_type = other DNA
gatataattcaggca

SEQ ID NO: 953 - DNA, 15 bp, synthetic construct
  source 1..15: mol_type = other DNA
tgttcccccactcct

SEQ ID NO: 954 - DNA, 15 bp, synthetic construct
  source 1..15: mol_type = other DNA
tatggactacatacc

SEQ ID NO: 955 - DNA, 15 bp, synthetic construct
  source 1..15: mol_type = other DNA
agaaaggccctgtgg

SEQ ID NO: 956 - DNA, 15 bp, synthetic construct
  source 1..15: mol_type = other DNA
ctttcaggtacttgt

SEQ ID NO: 957 - DNA, 15 bp, synthetic construct
  source 1..15: mol_type = other DNA
acacattatgtcaac

SEQ ID NO: 958 - DNA, 15 bp, synthetic construct
  source 1..15: mol_type = other DNA
ctctacattgtatga

SEQ ID NO: 959 - DNA, 15 bp, synthetic construct
  source 1..15: mol_type = other DNA
tatcaaatgcttcta

SEQ ID NO: 960 - DNA, 15 bp, synthetic construct
  source 1..15: mol_type = other DNA
cctgagttacataca

SEQ ID NO: 961 - DNA, 15 bp, synthetic construct
  source 1..15: mol_type = other DNA
ggaataccattttgg

SEQ ID NO: 962 - DNA, 15 bp, synthetic construct
  source 1..15: mol_type = other DNA
ggcagatagtaagtg

SEQ ID NO: 963 - DNA, 15 bp, synthetic construct
  source 1..15: mol_type = other DNA
tgactgatttacctg

SEQ ID NO: 964 - DNA, 15 bp, synthetic construct
  source 1..15: mol_type = other DNA
gattcagtgcataca

SEQ ID NO: 965 - DNA, 15 bp, synthetic construct
  source 1..15: mol_type = other DNA
aatacagtgaaagag

SEQ ID NO: 966 - DNA, 15 bp, synthetic construct
  source 1..15: mol_type = other DNA
tgtgtatcgtacgaa

SEQ ID NO: 967 - DNA, 15 bp, synthetic construct
  source 1..15: mol_type = other DNA
taacacccactttta

SEQ ID NO: 968 - DNA, 15 bp, synthetic construct
  source 1..15: mol_type = other DNA
tcggagcaggtatcc

SEQ ID NO: 969 - DNA, 15 bp, synthetic construct
  source 1..15: mol_type = other DNA
tgaaatcacgtacca

SEQ ID NO: 970 - DNA, 15 bp, synthetic construct
  source 1..15: mol_type = other DNA
tcggcaacttcgaaa

SEQ ID NO: 971 - DNA, 15 bp, synthetic construct
  source 1..15: mol_type = other DNA
attatactaagaaga

SEQ ID NO: 972 - DNA, 15 bp, synthetic construct
  source 1..15: mol_type = other DNA
cagtaacttcctgac

SEQ ID NO: 973 - DNA, 15 bp, synthetic construct
  source 1..15: mol_type = other DNA
ttgtgattatccaga

SEQ ID NO: 974 - DNA, 15 bp, synthetic construct
  source 1..15: mol_type = other DNA
gctctcctttcttcg

SEQ ID NO: 975 - DNA, 15 bp, synthetic construct
  source 1..15: mol_type = other DNA
ttagttcgtcttcag

SEQ ID NO: 976 - DNA, 15 bp, synthetic construct
  source 1..15: mol_type = other DNA
tttggaagagcgtag

SEQ ID NO: 977 - DNA, 15 bp, synthetic construct
  source 1..15: mol_type = other DNA
tctatagacgttgcc

SEQ ID NO: 978 - DNA, 15 bp, synthetic construct
  source 1..15: mol_type = other DNA
ggtaaaacaaggtga

SEQ ID NO: 979 - DNA, 15 bp, synthetic construct
  source 1..15: mol_type = other DNA
gtttggtcagtcaca

SEQ ID NO: 980 - DNA, 15 bp, synthetic construct
  source 1..15: mol_type = other DNA
aatacacacataaca

SEQ ID NO: 981 - DNA, 15 bp, synthetic construct
  source 1..15: mol_type = other DNA
ttattctcttccctt

SEQ ID NO: 982 - DNA, 15 bp, synthetic construct
  source 1..15: mol_type = other DNA
atgcacgtgggttga

SEQ ID NO: 983 - DNA, 15 bp, synthetic construct
  source 1..15: mol_type = other DNA
atcaattacatgtgg

SEQ ID NO: 984 - DNA, 15 bp, synthetic construct
  source 1..15: mol_type = other DNA
agcctgaatggaaag

SEQ ID NO: 985 - DNA, 15 bp, synthetic construct
  source 1..15: mol_type = other DNA
actattttacgacaa

SEQ ID NO: 986 - DNA, 15 bp, synthetic construct
  source 1..15: mol_type = other DNA
gtccaatgtgtcatt

SEQ ID NO: 987 - DNA, 15 bp, synthetic construct
  source 1..15: mol_type = other DNA
gtgatatcccagtat

SEQ ID NO: 988 - DNA, 15 bp, synthetic construct
  source 1..15: mol_type = other DNA
ggtaaatcagaccaa

SEQ ID NO: 989 - DNA, 15 bp, synthetic construct
  source 1..15: mol_type = other DNA
atgaaagcaatactg

SEQ ID NO: 990 - DNA, 15 bp, synthetic construct
  source 1..15: mol_type = other DNA
ccttcttttcccagt

SEQ ID NO: 991 - DNA, 15 bp, synthetic construct
  source 1..15: mol_type = other DNA
atatcaacctcactt

SEQ ID NO: 992 - DNA, 15 bp, synthetic construct
  source 1..15: mol_type = other DNA
ggtcaggagacaatc

SEQ ID NO: 993 - DNA, 15 bp, synthetic construct
  source 1..15: mol_type = other DNA
tcgcaagaaagacca

SEQ ID NO: 994 - DNA, 15 bp, synthetic construct
  source 1..15: mol_type = other DNA
aggcaaatatttgac

SEQ ID NO: 995 - DNA, 15 bp, synthetic construct
  source 1..15: mol_type = other DNA
ttgtttaggatgcta

SEQ ID NO: 996 - DNA, 15 bp, synthetic construct
  source 1..15: mol_type = other DNA
gaaatctaggattgc

SEQ ID NO: 997 - DNA, 15 bp, synthetic construct
  source 1..15: mol_type = other DNA
tatggacacagtgaa

SEQ ID NO: 998 - DNA, 15 bp, synthetic construct
  source 1..15: mol_type = other DNA
aggtatatctccaca

SEQ ID NO: 999 - DNA, 15 bp, synthetic construct
  source 1..15: mol_type = other DNA
tatggacacagtgaa

SEQ ID NO: 1000 - DNA, 15 bp, synthetic construct
  source 1..15: mol_type = other DNA
aggtatatctccaca

SEQ ID NO: 1001 - DNA, 15 bp, synthetic construct
  source 1..15: mol_type = other DNA
ttaccagtgtgtatt

SEQ ID NO: 1002 - DNA, 15 bp, synthetic construct
  source 1..15: mol_type = other DNA
gtgtccaatcattgt

SEQ ID NO: 1003 - DNA, 15 bp, synthetic construct
  source 1..15: mol_type = other DNA
ttaccagtgtgtatt

SEQ ID NO: 1004 - DNA, 15 bp, synthetic construct
  source 1..15: mol_type = other DNA
gtgtccaatcattgt

SEQ ID NO: 1005 - DNA, 15 bp, synthetic construct
  source 1..15: mol_type = other DNA
tccttattactatgg

SEQ ID NO: 1006 - DNA, 15 bp, synthetic construct
  source 1..15: mol_type = other DNA
aaagattggtctcat

SEQ ID NO: 1007 - DNA, 15 bp, synthetic construct
  source 1..15: mol_type = other DNA
ttcctatcatttgaa

SEQ ID NO: 1008 - DNA, 15 bp, synthetic construct
  source 1..15: mol_type = other DNA
ttacttgagcagttc

SEQ ID NO: 1009 - DNA, 15 bp, synthetic construct
  source 1..15: mol_type = other DNA
aggaaaagaaggatg

SEQ ID NO: 1010 - DNA, 15 bp, synthetic construct
  source 1..15: mol_type = other DNA
tcacagggcacagtt

SEQ ID NO: 1011 - DNA, 15 bp, synthetic construct
  source 1..15: mol_type = other DNA
agtataatatttgca

SEQ ID NO: 1012 - DNA, 15 bp, synthetic construct
  source 1..15: mol_type = other DNA
tggttgtcatattgt

SEQ ID NO: 1013 - DNA, 15 bp, synthetic construct
  source 1..15: mol_type = other DNA
attatgcccacctcc

SEQ ID NO: 1014 - DNA, 15 bp, synthetic construct
  source 1..15: mol_type = other DNA
gaccaacacagagtg

SEQ ID NO: 1015 - DNA, 15 bp, synthetic construct
  source 1..15: mol_type = other DNA
aagtatctgttcttt

SEQ ID NO: 1016 - DNA, 15 bp, synthetic construct
  source 1..15: mol_type = other DNA
tgattgattaatgtg

SEQ ID NO: 1017 - DNA, 15 bp, synthetic construct
  source 1..15: mol_type = other DNA
attttcattcttcat

SEQ ID NO: 1018 - DNA, 15 bp, synthetic construct
  source 1..15: mol_type = other DNA
ttggcctaaccttca

SEQ ID NO: 1019 - DNA, 15 bp, synthetic construct
  source 1..15: mol_type = other DNA
tgctacatgggaaaa

SEQ ID NO: 1020 - DNA, 15 bp, synthetic construct
  source 1..15: mol_type = other DNA
aagtgactctatcat

SEQ ID NO: 1021 - DNA, 15 bp, synthetic construct
  source 1..15: mol_type = other DNA
tagctcctgtattgt

SEQ ID NO: 1022 - DNA, 15 bp, synthetic construct
  source 1..15: mol_type = other DNA
tcctaagcattttgc

SEQ ID NO: 1023 - DNA, 15 bp, synthetic construct
  source 1..15: mol_type = other DNA
gttgtagctcacatg

SEQ ID NO: 1024 - DNA, 15 bp, synthetic construct
  source 1..15: mol_type = other DNA
atattcaagaaaacc

SEQ ID NO: 1025 - DNA, 15 bp, synthetic construct
  source 1..15: mol_type = other DNA
aagatttgcggaaca

SEQ ID NO: 1026 - DNA, 15 bp, synthetic construct
  source 1..15: mol_type = other DNA
ccaaagtacctctgc

SEQ ID NO: 1027 - DNA, 15 bp, synthetic construct
  source 1..15: mol_type = other DNA
agtttacctagcttt

SEQ ID NO: 1028 - DNA, 15 bp, synthetic construct
  source 1..15: mol_type = other DNA
acacattatataaat

SEQ ID NO: 1029 - DNA, 15 bp, synthetic construct
  source 1..15: mol_type = other DNA
ttgatttgctactca

SEQ ID NO: 1030 - DNA, 15 bp, synthetic construct
  source 1..15: mol_type = other DNA
agggctcctacattg

SEQ ID NO: 1031 - DNA, 15 bp, synthetic construct
  source 1..15: mol_type = other DNA
atagtgtcgagacag

SEQ ID NO: 1032 - DNA, 15 bp, synthetic construct
  source 1..15: mol_type = other DNA
tgcatttgaaaaatc

SEQ ID NO: 1033 - DNA, 15 bp, synthetic construct
  source 1..15: mol_type = other DNA
gtgtttgcgtttgcc

SEQ ID NO: 1034 - DNA, 15 bp, synthetic construct
  source 1..15: mol_type = other DNA
aagcattttggtggt

SEQ ID NO: 1035 - DNA, 15 bp, synthetic construct
  source 1..15: mol_type = other DNA
gtgggccccctccac

SEQ ID NO: 1036 - DNA, 15 bp, synthetic construct
  source 1..15: mol_type = other DNA
tcaataatctgtgag

SEQ ID NO: 1037 - DNA, 15 bp, synthetic construct
  source 1..15: mol_type = other DNA
taagtttattcaaat

SEQ ID NO: 1038 - DNA, 15 bp, synthetic construct
  source 1..15: mol_type = other DNA
ttctcgaataaagct

SEQ ID NO: 1039 - DNA, 15 bp, synthetic construct
  source 1..15: mol_type = other DNA
gtgtgtaatatcccg

SEQ ID NO: 1040 - DNA, 15 bp, synthetic construct
  source 1..15: mol_type = other DNA
ataaaggtgtgcact

SEQ ID NO: 1041 - DNA, 15 bp, synthetic construct
  source 1..15: mol_type = other DNA
acttttgtattagca

SEQ ID NO: 1042 - DNA, 15 bp, synthetic construct
  source 1..15: mol_type = other DNA
gtcacttctactagc

SEQ ID NO: 1043 - DNA, 15 bp, synthetic construct
  source 1..15: mol_type = other DNA
gaaggtgatatcaaa

SEQ ID NO: 1044 - DNA, 15 bp, synthetic construct
  source 1..15: mol_type = other DNA
cattttgtgtgcaat

SEQ ID NO: 1045 - DNA, 15 bp, synthetic construct
  source 1..15: mol_type = other DNA
attttgagactcctt

SEQ ID NO: 1046 - DNA, 15 bp, synthetic construct
  source 1..15: mol_type = other DNA
ttacataagacaaga

SEQ ID NO: 1047 - DNA, 15 bp, synthetic construct
  source 1..15: mol_type = other DNA
atgtttatgcgatct

SEQ ID NO: 1048 - DNA, 15 bp, synthetic construct
  source 1..15: mol_type = other DNA
tctccgtacatgtaa

SEQ ID NO: 1049 - DNA, 15 bp, synthetic construct
  source 1..15: mol_type = other DNA
agggtaactctacag

SEQ ID NO: 1050 - DNA, 15 bp, synthetic construct
  source 1..15: mol_type = other DNA
ataggtccgttggca

SEQ ID NO: 1051 - DNA, 15 bp, synthetic construct
  source 1..15: mol_type = other DNA
actattcaactaata

SEQ ID NO: 1052 - DNA, 15 bp, synthetic construct
  source 1..15: mol_type = other DNA
aatcacttactaatg

SEQ ID NO: 1053 - DNA, 15 bp, synthetic construct
  source 1..15: mol_type = other DNA
atcttcctctattta

SEQ ID NO: 1054 - DNA, 15 bp, synthetic construct
  source 1..15: mol_type = other DNA
gtatctctttactcc

SEQ ID NO: 1055 - DNA, 15 bp, synthetic construct
  source 1..15: mol_type = other DNA
tgtgaattatcttga

SEQ ID NO: 1056 - DNA, 15 bp, synthetic construct
  source 1..15: mol_type = other DNA
actcttgactgtggc

SEQ ID NO: 1057 - DNA, 15 bp, synthetic construct
  source 1..15: mol_type = other DNA
ttgctcatgaaagag

SEQ ID NO: 1058 - DNA, 15 bp, synthetic construct
  source 1..15: mol_type = other DNA
tatcccttcccgaca

SEQ ID NO: 1059 - DNA, 15 bp, synthetic construct
  source 1..15: mol_type = other DNA
gaagaagtgacagaa

SEQ ID NO: 1060 - DNA, 15 bp, synthetic construct
  source 1..15: mol_type = other DNA
gtgagaagtggaaaa

SEQ ID NO: 1061 - DNA, 15 bp, synthetic construct
  source 1..15: mol_type = other DNA
gtacactggaaagca

SEQ ID NO: 1062 - DNA, 15 bp, synthetic construct
  source 1..15: mol_type = other DNA
tcccctgtaggaacc

SEQ ID NO: 1063 - DNA, 15 bp, synthetic construct
  source 1..15: mol_type = other DNA
caacattttgtgatt

SEQ ID NO: 1064 - DNA, 15 bp, synthetic construct
  source 1..15: mol_type = other DNA
catttaatgaacaga

SEQ ID NO: 1065 - DNA, 15 bp, synthetic construct
  source 1..15: mol_type = other DNA
tgtacattaatccgt

SEQ ID NO: 1066 - DNA, 15 bp, synthetic construct
  source 1..15: mol_type = other DNA
agagaacagcattgt

SEQ ID NO: 1067 - DNA, 15 bp, synthetic construct
  source 1..15: mol_type = other DNA
tgctactcaaaatga

SEQ ID NO: 1068 - DNA, 15 bp, synthetic construct
  source 1..15: mol_type = other DNA
agggctcctacattc

SEQ ID NO: 1069 - DNA, 15 bp, synthetic construct
  source 1..15: mol_type = other DNA
aatatccatctggtg

SEQ ID NO: 1070 - DNA, 15 bp, synthetic construct
  source 1..15: mol_type = other DNA
tttaagcaccatcaa

SEQ ID NO: 1071 - DNA, 15 bp, synthetic construct
  source 1..15: mol_type = other DNA
gtatttgccttattt

SEQ ID NO: 1072 - DNA, 15 bp, synthetic construct
  source 1..15: mol_type = other DNA
gcattttggtggttc

SEQ ID NO: 1073 - DNA, 15 bp, synthetic construct
  source 1..15: mol_type = other DNA
gtgggccccctccac

SEQ ID NO: 1074 - DNA, 15 bp, synthetic construct
  source 1..15: mol_type = other DNA
tcaataatctgtgat

SEQ ID NO: 1075 - DNA, 15 bp, synthetic construct
  source 1..15: mol_type = other DNA
cagtgttttgagaaa

SEQ ID NO: 1076 - DNA, 15 bp, synthetic construct
  source 1..15: mol_type = other DNA
gtgagaacgtgatga

SEQ ID NO: 1077 - DNA, 15 bp, synthetic construct
  source 1..15: mol_type = other DNA
gtgaatcagctgaat

SEQ ID NO: 1078 - DNA, 15 bp, synthetic construct
  source 1..15: mol_type = other DNA
gcttataattacatt

SEQ ID NO: 1079 - DNA, 15 bp, synthetic construct
  source 1..15: mol_type = other DNA
ttattgtgaagacac

SEQ ID NO: 1080 - DNA, 15 bp, synthetic construct
  source 1..15: mol_type = other DNA
tacccatgagattag

SEQ ID NO: 1081 - DNA, 15 bp, synthetic construct
  source 1..15: mol_type = other DNA
gcatgttgctcttat

SEQ ID NO: 1082 - DNA, 15 bp, synthetic construct
  source 1..15: mol_type = other DNA
ttcaaattatcctca

SEQ ID NO: 1083 - DNA, 15 bp, synthetic construct
  source 1..15: mol_type = other DNA
agctgaatgaaaaac

SEQ ID NO: 1084 - DNA, 15 bp, synthetic construct
  source 1..15: mol_type = other DNA
tgggaaaaagggtta

SEQ ID NO: 1085 - DNA, 15 bp, synthetic construct
  source 1..15: mol_type = other DNA
gtatgatgaagaaga

SEQ ID NO: 1086 - DNA, 15 bp, synthetic construct
  source 1..15: mol_type = other DNA
ttgcccttgtgatta

SEQ ID NO: 1087 - DNA, 15 bp, synthetic construct
  source 1..15: mol_type = other DNA
ttcaaagttttcctt

SEQ ID NO: 1088 - DNA, 15 bp, synthetic construct
  source 1..15: mol_type = other DNA
acacacgaaatgttt

SEQ ID NO: 1089 - DNA, 15 bp, synthetic construct
  source 1..15: mol_type = other DNA
acacaggatacagcc

SEQ ID NO: 1090 - DNA, 15 bp, synthetic construct
  source 1..15: mol_type = other DNA
acacaattggaaccg

SEQ ID NO: 1091 - DNA, 15 bp, synthetic construct
  source 1..15: mol_type = other DNA
ctcgaaggcaagaat

SEQ ID NO: 1092 - DNA, 15 bp, synthetic construct
  source 1..15: mol_type = other DNA
tctgatccaactctt

SEQ ID NO: 1093 - DNA, 15 bp, synthetic construct
  source 1..15: mol_type = other DNA
aatgtagatgctcag

SEQ ID NO: 1094 - DNA, 15 bp, synthetic construct
  source 1..15: mol_type = other DNA
ccactttgtcagatt

SEQ ID NO: 1095 - DNA, 15 bp, synthetic construct
  source 1..15: mol_type = other DNA
aaaaatagaagtgca

SEQ ID NO: 1096 - DNA, 15 bp, synthetic construct
  source 1..15: mol_type = other DNA
tttcttaggcccgtt

SEQ ID NO: 1097 - DNA, 15 bp, synthetic construct
  source 1..15: mol_type = other DNA
caatgaagtagtgga

SEQ ID NO: 1098 - DNA, 15 bp, synthetic construct
  source 1..15: mol_type = other DNA
atgtatccacatgtt

SEQ ID NO: 1099 - DNA, 15 bp, synthetic construct
  source 1..15: mol_type = other DNA
caatgaagtagtgga

SEQ ID NO: 1100 - DNA, 15 bp, synthetic construct
  source 1..15: mol_type = other DNA
atgtatccacatgtt

SEQ ID NO: 1101 - DNA, 15 bp, synthetic construct
  source 1..15: mol_type = other DNA
attactttgcactta

SEQ ID NO: 1102 - DNA, 15 bp, synthetic construct
  source 1..15: mol_type = other DNA
ctctgtccatattcc

SEQ ID NO: 1103 - DNA, 15 bp, synthetic construct
  source 1..15: mol_type = other DNA
cggttatgttcagcc

SEQ ID NO: 1104 - DNA, 15 bp, synthetic construct
  source 1..15: mol_type = other DNA
aagagtcagtatcaa

SEQ ID NO: 1105 - DNA, 15 bp, synthetic construct
  source 1..15: mol_type = other DNA
ttgtgatgttgctta

SEQ ID NO: 1106 - DNA, 15 bp, synthetic construct
  source 1..15: mol_type = other DNA
tttatacagactgag

SEQ ID NO: 1107 - DNA, 15 bp, synthetic construct
  source 1..15: mol_type = other DNA
ttcagatacaggcac

SEQ ID NO: 1108 - DNA, 15 bp, synthetic construct
  source 1..15: mol_type = other DNA
gcttttaaagaataa

SEQ ID NO: 1109 - DNA, 15 bp, synthetic construct
  source 1..15: mol_type = other DNA
ctaccctattgagct

SEQ ID NO: 1110 - DNA, 15 bp, synthetic construct
  source 1..15: mol_type = other DNA
taaccaacacagcgt

SEQ ID NO: 1111 - DNA, 15 bp, synthetic construct
  source 1..15: mol_type = other DNA
atgacaaccacagtg

SEQ ID NO: 1112 - DNA, 15 bp, synthetic construct
  source 1..15: mol_type = other DNA
aatttaaggctttgg

SEQ ID NO: 1113 - DNA, 15 bp, synthetic construct
  source 1..15: mol_type = other DNA
ttgaatcagacttta

SEQ ID NO: 1114 - DNA, 15 bp, synthetic construct
  source 1..15: mol_type = other DNA
actggcaacggtacg

SEQ ID NO: 1115 - DNA, 15 bp, synthetic construct
  source 1..15: mol_type = other DNA
taccacctcattccc

SEQ ID NO: 1116 - DNA, 15 bp, synthetic construct
  source 1..15: mol_type = other DNA
agattttgactgaat

SEQ ID NO: 1117 - DNA, 15 bp, synthetic construct
  source 1..15: mol_type = other DNA
cacagtgctaagaac

SEQ ID NO: 1118 - DNA, 15 bp, synthetic construct
  source 1..15: mol_type = other DNA
catagagttttccat

SEQ ID NO: 1119 - DNA, 15 bp, synthetic construct
  source 1..15: mol_type = other DNA
tcagatccatgtgtg

SEQ ID NO: 1120 - DNA, 15 bp, synthetic construct
  source 1..15: mol_type = other DNA
gcatagatggatgtt

SEQ ID NO: 1121 - DNA, 15 bp, synthetic construct
  source 1..15: mol_type = other DNA
gtggtcataaaagtg

SEQ ID NO: 1122 - DNA, 15 bp, synthetic construct
  source 1..15: mol_type = other DNA
ctctcctcttttgtt

SEQ ID NO: 1123 - DNA, 15 bp, synthetic construct
  source 1..15: mol_type = other DNA
ccagggtttcaacaa

SEQ ID NO: 1124 - DNA, 15 bp, synthetic construct
  source 1..15: mol_type = other DNA
acttttccctcctct

SEQ ID NO: 1125 - DNA, 15 bp, synthetic construct
  source 1..15: mol_type = other DNA
ccatttggagaatca

SEQ ID NO: 1126 - DNA, 15 bp, synthetic construct
  source 1..15: mol_type = other DNA
atattgactgagcct

SEQ ID NO: 1127 - DNA, 15 bp, synthetic construct
  source 1..15: mol_type = other DNA
ctctggctaaggata

SEQ ID NO: 1128 - DNA, 15 bp, synthetic construct
  source 1..15: mol_type = other DNA
tggtcccatgcaatt

SEQ ID NO: 1129 - DNA, 15 bp, synthetic construct
  source 1..15: mol_type = other DNA
catgatgtcagcctc

SEQ ID NO: 1130 - DNA, 15 bp, synthetic construct
  source 1..15: mol_type = other DNA
gatggtgtaggctta

SEQ ID NO: 1131 - DNA, 15 bp, synthetic construct
  source 1..15: mol_type = other DNA
ccagtccagaatcta

SEQ ID NO: 1132 - DNA, 15 bp, synthetic construct
  source 1..15: mol_type = other DNA
tgttagttcttattc

SEQ ID NO: 1133 - DNA, 15 bp, synthetic construct
  source 1..15: mol_type = other DNA
gtctgtctgaactaa

SEQ ID NO: 1134 - DNA, 15 bp, synthetic construct
  source 1..15: mol_type = other DNA
tcttttctttaccac

SEQ ID NO: 1135 - DNA, 15 bp, synthetic construct
  source 1..15: mol_type = other DNA
cagaacttcaaaaca

SEQ ID NO: 1136 - DNA, 15 bp, synthetic construct
  source 1..15: mol_type = other DNA
ctagtagtgctaatg

SEQ ID NO: 1137 - DNA, 15 bp, synthetic construct
  source 1..15: mol_type = other DNA
ttgctatgttggtac

SEQ ID NO: 1138 - DNA, 15 bp, synthetic construct
  source 1..15: mol_type = other DNA
actttgttttgagtg

SEQ ID NO: 1139 - DNA, 15 bp, synthetic construct
  source 1..15: mol_type = other DNA
gtgcaatgtgcagaa

SEQ ID NO: 1140 - DNA, 15 bp, synthetic construct
  source 1..15: mol_type = other DNA
attcagcagagtcct

SEQ ID NO: 1141 - DNA, 15 bp, synthetic construct
  source 1..15: mol_type = other DNA
cataactctgtccaa

SEQ ID NO: 1142 - DNA, 15 bp, synthetic construct
  source 1..15: mol_type = other DNA
tgaacacaaaaatgc

SEQ ID NO: 1143 - DNA, 15 bp, synthetic construct
  source 1..15: mol_type = other DNA
aaccaggactcaatg

SEQ ID NO: 1144 - DNA, 15 bp, synthetic construct
  source 1..15: mol_type = other DNA
catgaatgtccattt

SEQ ID NO: 1145 - DNA, 15 bp, synthetic construct
  source 1..15: mol_type = other DNA
gctgtaatttgacca

SEQ ID NO: 1146 - DNA, 15 bp, synthetic construct
  source 1..15: mol_type = other DNA
tttgtgatcctgaag

SEQ ID NO: 1147 - DNA, 15 bp, synthetic construct
  source 1..15: mol_type = other DNA
aaactggtgcatctg

SEQ ID NO: 1148 - DNA, 15 bp, synthetic construct
  source 1..15: mol_type = other DNA
gtgtgattgactttt

SEQ ID NO: 1149 - DNA, 15 bp, synthetic construct
  source 1..15: mol_type = other DNA
gcaggtacttgaact

SEQ ID NO: 1150 - DNA, 15 bp, synthetic construct
  source 1..15: mol_type = other DNA
acttctattcgggtt

SEQ ID NO: 1151 - DNA, 15 bp, synthetic construct
  source 1..15: mol_type = other DNA
agttctttcattgct

SEQ ID NO: 1152 - DNA, 15 bp, synthetic construct
  source 1..15: mol_type = other DNA
acttaatcagtggat

SEQ ID NO: 1153 - DNA, 15 bp, synthetic construct
  source 1..15: mol_type = other DNA
aaaggccaacttgtt

SEQ ID NO: 1154 - DNA, 15 bp, synthetic construct
  source 1..15: mol_type = other DNA
atgttagtgtccatg

SEQ ID NO: 1155 - DNA, 15 bp, synthetic construct
  source 1..15: mol_type = other DNA
aactagaataaagta

SEQ ID NO: 1156 - DNA, 15 bp, synthetic construct
  source 1..15: mol_type = other DNA
agaccatagcatccg

SEQ ID NO: 1157 - DNA, 15 bp, synthetic construct
  source 1..15: mol_type = other DNA
gcacacacttacctg

SEQ ID NO: 1158 - DNA, 15 bp, synthetic construct
  source 1..15: mol_type = other DNA
tctcaatgtggtgtt

SEQ ID NO: 1159 - DNA, 15 bp, synthetic construct
  source 1..15: mol_type = other DNA
tacttttctcatcta

SEQ ID NO: 1160 - DNA, 15 bp, synthetic construct
  source 1..15: mol_type = other DNA
aaataaccagaaggc

SEQ ID NO: 1161 - DNA, 15 bp, synthetic construct
  source 1..15: mol_type = other DNA
ctttttgttgacata

SEQ ID NO: 1162 - DNA, 15 bp, synthetic construct
  source 1..15: mol_type = other DNA
tggagaagctttaat

SEQ ID NO: 1163 - DNA, 15 bp, synthetic construct
  source 1..15: mol_type = other DNA
ctttataggcaacac

SEQ ID NO: 1164 - DNA, 15 bp, synthetic construct
  source 1..15: mol_type = other DNA
aaacatcttgctaca

SEQ ID NO: 1165 - DNA, 15 bp, synthetic construct
  source 1..15: mol_type = other DNA
actctgttgtagatc

SEQ ID NO: 1166 - DNA, 15 bp, synthetic construct
  source 1..15: mol_type = other DNA
acctcaagtagtaca

SEQ ID NO: 1167 - DNA, 15 bp, synthetic construct
  source 1..15: mol_type = other DNA
tattatagcacccat

SEQ ID NO: 1168 - DNA, 15 bp, synthetic construct
  source 1..15: mol_type = other DNA
aaaggaatagcccaa

SEQ ID NO: 1169 - DNA, 15 bp, synthetic construct
  source 1..15: mol_type = other DNA
gaaaccacatgttat

SEQ ID NO: 1170 - DNA, 15 bp, synthetic construct
  source 1..15: mol_type = other DNA
gaaagcaggaattat

SEQ ID NO: 1171 - DNA, 15 bp, synthetic construct
  source 1..15: mol_type = other DNA
aatgatcatcagcaa

SEQ ID NO: 1172 - DNA, 15 bp, synthetic construct
  source 1..15: mol_type = other DNA
acaatttcatactgt

SEQ ID NO: 1173 - DNA, 15 bp, synthetic construct
  source 1..15: mol_type = other DNA
ttgctttgtacagag

SEQ ID NO: 1174 - DNA, 15 bp, synthetic construct
  source 1..15: mol_type = other DNA
atcttatacatctgg

SEQ ID NO: 1175 - DNA, 15 bp, synthetic construct
  source 1..15: mol_type = other DNA
ccagagcaacacact

SEQ ID NO: 1176 - DNA, 15 bp, synthetic construct
  source 1..15: mol_type = other DNA
actgtggaaattgtt

SEQ ID NO: 1177 - DNA, 15 bp, synthetic construct
  source 1..15: mol_type = other DNA
catcctccatcacta

SEQ ID NO: 1178 - DNA, 15 bp, synthetic construct
  source 1..15: mol_type = other DNA
gaagaaacattaagc

SEQ ID NO: 1179 - DNA, 15 bp, synthetic construct
  source 1..15: mol_type = other DNA
tattaaacgggcttg

SEQ ID NO: 1180 - DNA, 15 bp, synthetic construct
  source 1..15: mol_type = other DNA
ttgtgctttctagat

SEQ ID NO: 1181 - DNA, 15 bp, synthetic construct
  source 1..15: mol_type = other DNA
aatgaagtcagtcta

SEQ ID NO: 1182 - DNA, 15 bp, synthetic construct
  source 1..15: mol_type = other DNA
ttcttgctgagaagt

SEQ ID NO: 1183 - DNA, 15 bp, synthetic construct
  source 1..15: mol_type = other DNA
aatttcatcaaaagg

SEQ ID NO: 1184 - DNA, 15 bp, synthetic construct
  source 1..15: mol_type = other DNA
ttttacagctttccc

SEQ ID NO: 1185 - DNA, 15 bp, synthetic construct
  source 1..15: mol_type = other DNA
ggtgaaaactgaaag

SEQ ID NO: 1186 - DNA, 15 bp, synthetic construct
  source 1..15: mol_type = other DNA
ctgctgatctgaatt

SEQ ID NO: 1187 - DNA, 15 bp, synthetic construct
  source 1..15: mol_type = other DNA
catgaaggtcaacat

SEQ ID NO: 1188 - DNA, 15 bp, synthetic construct
  source 1..15: mol_type = other DNA
ttttgtcttttcact

SEQ ID NO: 1189 - DNA, 15 bp, synthetic construct
  source 1..15: mol_type = other DNA
tcctctttgcccttg

SEQ ID NO: 1190 - DNA, 15 bp, synthetic construct
  source 1..15: mol_type = other DNA
tttgtttttgtgaga

SEQ ID NO: 1191 - DNA, 15 bp, synthetic construct
  source 1..15: mol_type = other DNA
gcttattttctaaat

SEQ ID NO: 1192 - DNA, 15 bp, synthetic construct
  source 1..15: mol_type = other DNA
atcacattgaaatga

SEQ ID NO: 1193 - DNA, 15 bp, synthetic construct
  source 1..15: mol_type = other DNA
aaccagaaggtcgtg

SEQ ID NO: 1194 - DNA, 15 bp, synthetic construct
  source 1..15: mol_type = other DNA
tacgttcttctttgg

SEQ ID NO: 1195 - DNA, 15 bp, synthetic construct
  source 1..15: mol_type = other DNA
gaagcttgcaggtat

SEQ ID NO: 1196 - DNA, 15 bp, synthetic construct
  source 1..15: mol_type = other DNA
gtgaacttgcttcct

SEQ ID NO: 1197 - DNA, 15 bp, synthetic construct
  source 1..15: mol_type = other DNA
tgcatttccaataca

SEQ ID NO: 1198 - DNA, 15 bp, synthetic construct
  source 1..15: mol_type = other DNA
ggtagtcttcatgag

SEQ ID NO: 1199 - DNA, 15 bp, synthetic construct
  source 1..15: mol_type = other DNA
tcgtgtcagggtgtt

SEQ ID NO: 1200 - DNA, 15 bp, synthetic construct
  source 1..15: mol_type = other DNA
atatattttggaaac

SEQ ID NO: 1201 - DNA, 15 bp, synthetic construct
  source 1..15: mol_type = other DNA
atgtaactgcttggc

SEQ ID NO: 1202 - DNA, 15 bp, synthetic construct
  source 1..15: mol_type = other DNA
caatactgaagaata

SEQ ID NO: 1203 - DNA, 15 bp, synthetic construct
  source 1..15: mol_type = other DNA
cggatctttcctgtt

SEQ ID NO: 1204 - DNA, 15 bp, synthetic construct
  source 1..15: mol_type = other DNA
tatcaaagtgttggg

SEQ ID NO: 1205 - DNA, 15 bp, synthetic construct
  source 1..15: mol_type = other DNA
caatacttctatgat

SEQ ID NO: 1206 - DNA, 15 bp, synthetic construct
  source 1..15: mol_type = other DNA
cttctgtacctttag

SEQ ID NO: 1207 - DNA, 15 bp, synthetic construct
  source 1..15: mol_type = other DNA
atttcaatgacctgt

SEQ ID NO: 1208 - DNA, 15 bp, synthetic construct
  source 1..15: mol_type = other DNA
ttggaagacacaact

SEQ ID NO: 1209 - DNA, 15 bp, synthetic construct
  source 1..15: mol_type = other DNA
taagacgtgtttctg

SEQ ID NO: 1210 - DNA, 15 bp, synthetic construct
  source 1..15: mol_type = other DNA
cgacttaagctgcat

SEQ ID NO: 1211 - DNA, 15 bp, synthetic construct
  source 1..15: mol_type = other DNA
ctttacctgcagatc

SEQ ID NO: 1212 - DNA, 15 bp, synthetic construct
  source 1..15: mol_type = other DNA
aatcaaatgaatgtc

SEQ ID NO: 1213 - DNA, 15 bp, synthetic construct
  source 1..15: mol_type = other DNA
agtctttattctctt

SEQ ID NO: 1214 - DNA, 15 bp, synthetic construct
  source 1..15: mol_type = other DNA
catccgaaagttcta

SEQ ID NO: 1215 - DNA, 15 bp, synthetic construct
  source 1..15: mol_type = other DNA
atgcggttgttacgc

SEQ ID NO: 1216 - DNA, 15 bp, synthetic construct
  source 1..15: mol_type = other DNA
gagaatgctcatgtg

SEQ ID NO: 1217 - DNA, 15 bp, synthetic construct
  source 1..15: mol_type = other DNA
tctgtcactctttga

SEQ ID NO: 1218 - DNA, 15 bp, synthetic construct
  source 1..15: mol_type = other DNA
gaaggctctctttgc

SEQ ID NO: 1219 - DNA, 15 bp, synthetic construct
  source 1..15: mol_type = other DNA
tgagccgataccagg

SEQ ID NO: 1220 - DNA, 15 bp, synthetic construct
  source 1..15: mol_type = other DNA
tagacaccggtgcat

SEQ ID NO: 1221 - DNA, 15 bp, synthetic construct
  source 1..15: mol_type = other DNA
ctatggagctggtag

SEQ ID NO: 1222 - DNA, 15 bp, synthetic construct
  source 1..15: mol_type = other DNA
ccttccctcctctac

SEQ ID NO: 1223 - DNA, 15 bp, synthetic construct
  source 1..15: mol_type = other DNA
ctgcatttggaaaga

SEQ ID NO: 1224 - DNA, 15 bp, synthetic construct
  source 1..15: mol_type = other DNA
ccaagagcttctgat

SEQ ID NO: 1225 - DNA, 15 bp, synthetic construct
  source 1..15: mol_type = other DNA
tgtaattctaggtca

SEQ ID NO: 1226 - DNA, 15 bp, synthetic construct
  source 1..15: mol_type = other DNA
ctcatggactgggta

SEQ ID NO: 1227 - DNA, 15 bp, synthetic construct
  source 1..15: mol_type = other DNA
tgattggctgtcacc

SEQ ID NO: 1228 - DNA, 15 bp, synthetic construct
  source 1..15: mol_type = other DNA
acccctatcttcgac

SEQ ID NO: 1229 - DNA, 15 bp, synthetic construct
  source 1..15: mol_type = other DNA
gtcctcttttagcac

SEQ ID NO: 1230 - DNA, 15 bp, synthetic construct
  source 1..15: mol_type = other DNA
ccctagtgtggaagc

SEQ ID NO: 1231 - DNA, 15 bp, synthetic construct
  source 1..15: mol_type = other DNA
gtactgctgctttgc

SEQ ID NO: 1232 - DNA, 15 bp, synthetic construct
  source 1..15: mol_type = other DNA
tccagctacaagcac

SEQ ID NO: 1233 - DNA, 15 bp, synthetic construct
  source 1..15: mol_type = other DNA
cctgttgaatagcgg

SEQ ID NO: 1234 - DNA, 15 bp, synthetic construct
  source 1..15: mol_type = other DNA
cagtccttgattgat

SEQ ID NO: 1235 - DNA, 15 bp, synthetic construct
  source 1..15: mol_type = other DNA
gtggctgtatcagaa

SEQ ID NO: 1236 - DNA, 15 bp, synthetic construct
  source 1..15: mol_type = other DNA
tgacactggttcgtc

SEQ ID NO: 1237 - DNA, 15 bp, synthetic construct
  source 1..15: mol_type = other DNA
taggtctcaccacag

SEQ ID NO: 1238 - DNA, 15 bp, synthetic construct
  source 1..15: mol_type = other DNA
gagaggctataggac

SEQ ID NO: 1239 - DNA, 15 bp, synthetic construct
  source 1..15: mol_type = other DNA
ctagggtgctcacgt

SEQ ID NO: 1240 - DNA, 15 bp, synthetic construct
  source 1..15: mol_type = other DNA
cgagaaagcctgaag

SEQ ID NO: 1241 - DNA, 15 bp, synthetic construct
  source 1..15: mol_type = other DNA
tggtgaggatcacgg

SEQ ID NO: 1242 - DNA, 15 bp, synthetic construct
  source 1..15: mol_type = other DNA
gctaacgttaaaggt

SEQ ID NO: 1243 - DNA, 15 bp, synthetic construct
  source 1..15: mol_type = other DNA
gatcgtaaggactga

SEQ ID NO: 1244 - DNA, 15 bp, synthetic construct
  source 1..15: mol_type = other DNA
ggatctcagagagag

SEQ ID NO: 1245 - DNA, 15 bp, synthetic construct
  source 1..15: mol_type = other DNA
agagagtgaaagaga

SEQ ID NO: 1246 - DNA, 15 bp, synthetic construct
  source 1..15: mol_type = other DNA
tgatcttgtttccat

SEQ ID NO: 1247 - DNA, 15 bp, synthetic construct
  source 1..15: mol_type = other DNA
ctacggccctgctat

SEQ ID NO: 1248 - DNA, 15 bp, synthetic construct
  source 1..15: mol_type = other DNA
tcagggaagtacgat

SEQ ID NO: 1249 - DNA, 15 bp, synthetic construct
  source 1..15: mol_type = other DNA
ttccaaaagcgtaga

SEQ ID NO: 1250 - DNA, 15 bp, synthetic construct
  source 1..15: mol_type = other DNA
cttagtattgagctg

SEQ ID NO: 1251 - DNA, 15 bp, synthetic construct
  source 1..15: mol_type = other DNA
gtagtgattgtggaa

SEQ ID NO: 1252 - DNA, 15 bp, synthetic construct
  source 1..15: mol_type = other DNA
agaaacaaggtgact

SEQ ID NO: 1253 - DNA, 15 bp, synthetic construct
  source 1..15: mol_type = other DNA
cttttcttaggatct

SEQ ID NO: 1254 - DNA, 15 bp, synthetic construct
  source 1..15: mol_type = other DNA
ttgccttatcatgac

SEQ ID NO: 1255 - DNA, 15 bp, synthetic construct
  source 1..15: mol_type = other DNA
ataaacaggagagga

SEQ ID NO: 1256 - DNA, 15 bp, synthetic construct
  source 1..15: mol_type = other DNA
agcccaagccttgta

SEQ ID NO: 1257 - DNA, 15 bp, synthetic construct
  source 1..15: mol_type = other DNA
taaaccagggttcta

SEQ ID NO: 1258 - DNA, 15 bp, synthetic construct
  source 1..15: mol_type = other DNA
gccttatctctgtct

SEQ ID NO: 1259 - DNA, 15 bp, synthetic construct
  source 1..15: mol_type = other DNA
actaggattctctga

SEQ ID NO: 1260 - DNA, 15 bp, synthetic construct
  source 1..15: mol_type = other DNA
agggacttaagtcat

SEQ ID NO: 1261 - DNA, 15 bp, synthetic construct
  source 1..15: mol_type = other DNA
tatctcctttcctac

SEQ ID NO: 1262 - DNA, 15 bp, synthetic construct
  source 1..15: mol_type = other DNA
gtggttcttgtctct

SEQ ID NO: 1263 - DNA, 15 bp, synthetic construct
  source 1..15: mol_type = other DNA
tcatttgagccaact

SEQ ID NO: 1264 - DNA, 15 bp, synthetic construct
  source 1..15: mol_type = other DNA
tggaaaccctgagtc

SEQ ID NO: 1265 - DNA, 15 bp, synthetic construct
  source 1..15: mol_type = other DNA
gaaattcttgcctaa

SEQ ID NO: 1266 - DNA, 15 bp, synthetic construct
  source 1..15: mol_type = other DNA
ggaactcatcatctc

SEQ ID NO: 1267 - DNA, 15 bp, synthetic construct
  source 1..15: mol_type = other DNA
cttattagccactgc

SEQ ID NO: 1268 - DNA, 15 bp, synthetic construct
  source 1..15: mol_type = other DNA
gacatcatcaacgaa

SEQ ID NO: 1269 - DNA, 15 bp, synthetic construct
  source 1..15: mol_type = other DNA
aaatggttagagact

SEQ ID NO: 1270 - DNA, 15 bp, synthetic construct
  source 1..15: mol_type = other DNA
gcatttgacatgcag

SEQ ID NO: 1271 - DNA, 15 bp, synthetic construct
  source 1..15: mol_type = other DNA
gtttgggagtgatct

SEQ ID NO: 1272 - DNA, 15 bp, synthetic construct
  source 1..15: mol_type = other DNA
tcgccagctaattga

SEQ ID NO: 1273 - DNA, 15 bp, synthetic construct
  source 1..15: mol_type = other DNA
gttccaccaacatgc

SEQ ID NO: 1274 - DNA, 15 bp, synthetic construct
  source 1..15: mol_type = other DNA
ctccacaaagatgaa

SEQ ID NO: 1275 - DNA, 15 bp, synthetic construct
  source 1..15: mol_type = other DNA
tcctgaagctcttgc

SEQ ID NO: 1276 - DNA, 15 bp, synthetic construct
  source 1..15: mol_type = other DNA
attgttccattgtag

SEQ ID NO: 1277 - DNA, 15 bp, synthetic construct
  source 1..15: mol_type = other DNA
agagttcagactata

SEQ ID NO: 1278 - DNA, 15 bp, synthetic construct
  source 1..15: mol_type = other DNA
gaactagtgcacacg

SEQ ID NO: 1279 - DNA, 15 bp, synthetic construct
  source 1..15: mol_type = other DNA
gttctcttggacctc

SEQ ID NO: 1280 - DNA, 15 bp, synthetic construct
  source 1..15: mol_type = other DNA
tgcatactgatcctc

SEQ ID NO: 1281 - DNA, 15 bp, synthetic construct
  source 1..15: mol_type = other DNA
ttgacgttacaatcc

SEQ ID NO: 1282 - DNA, 15 bp, synthetic construct
  source 1..15: mol_type = other DNA
tatgtccttcaacca

SEQ ID NO: 1283 - DNA, 15 bp, synthetic construct
  source 1..15: mol_type = other DNA
cgtcctccgatttgc

SEQ ID NO: 1284 - DNA, 15 bp, synthetic construct
  source 1..15: mol_type = other DNA
atgatccgcgagctg

SEQ ID NO: 1285 - DNA, 15 bp, synthetic construct
  source 1..15: mol_type = other DNA
cggaagaacttctgg

SEQ ID NO: 1286 - DNA, 15 bp, synthetic construct
  source 1..15: mol_type = other DNA
tcctcctcccttcgg

SEQ ID NO: 1287 - DNA, 15 bp, synthetic construct
  source 1..15: mol_type = other DNA
agtgcagagggatgg

SEQ ID NO: 1288 - DNA, 15 bp, synthetic construct
  source 1..15: mol_type = other DNA
ttctcctgtacatcg

SEQ ID NO: 1289 - DNA, 15 bp, synthetic construct
  source 1..15: mol_type = other DNA
gatggagaagttgtc

SEQ ID NO: 1290 - DNA, 15 bp, synthetic construct
  source 1..15: mol_type = other DNA
attatggccagccaa

SEQ ID NO: 1291 - DNA, 15 bp, synthetic construct
  source 1..15: mol_type = other DNA
taagaggccaagtct

SEQ ID NO: 1292 - DNA, 15 bp, synthetic construct
  source 1..15: mol_type = other DNA
cctcttttccccaat

SEQ ID NO: 1293 - DNA, 15 bp, synthetic construct
  source 1..15: mol_type = other DNA
cttaagtgaagctca

SEQ ID NO: 1294 - DNA, 15 bp, synthetic construct
  source 1..15: mol_type = other DNA
tctaagcccgtatgt

SEQ ID NO: 1295 - DNA, 15 bp, synthetic construct
  source 1..15: mol_type = other DNA
cattaaggtcttgaa

SEQ ID NO: 1296 - DNA, 15 bp, synthetic construct
  source 1..15: mol_type = other DNA
gggaggcctcatctt

SEQ ID NO: 1297 - DNA, 15 bp, synthetic construct
  source 1..15: mol_type = other DNA
atcacaggcgtgaag

SEQ ID NO: 1298 - DNA, 15 bp, synthetic construct
  source 1..15: mol_type = other DNA
gaatgttatgagcag

SEQ ID NO: 1299 - DNA, 15 bp, synthetic construct
  source 1..15: mol_type = other DNA
aaagaagtctgtgga

SEQ ID NO: 1300 - DNA, 15 bp, synthetic construct
  source 1..15: mol_type = other DNA
gtagggaaacacagt

SEQ ID NO: 1301 - DNA, 15 bp, synthetic construct
  source 1..15: mol_type = other DNA
tactaccatctctcc

SEQ ID NO: 1302 - DNA, 15 bp, synthetic construct
  source 1..15: mol_type = other DNA
atctcttctcaccct

SEQ ID NO: 1303 - DNA, 15 bp, synthetic construct
  source 1..15: mol_type = other DNA
aaacaaaaagagaga

SEQ ID NO: 1304 - DNA, 15 bp, synthetic construct
  source 1..15: mol_type = other DNA
gttaccactcctgtc

SEQ ID NO: 1305 - DNA, 15 bp, synthetic construct
  source 1..15: mol_type = other DNA
actggagattcactc

SEQ ID NO: 1306 - DNA, 15 bp, synthetic construct
  source 1..15: mol_type = other DNA
taggcaggagcctaa

SEQ ID NO: 1307 - DNA, 15 bp, synthetic construct
  source 1..15: mol_type = other DNA
gagaagggctcgtag

SEQ ID NO: 1308 - DNA, 15 bp, synthetic construct
  source 1..15: mol_type = other DNA
gttgaacctcaatgc

SEQ ID NO: 1309 - DNA, 15 bp, synthetic construct
  source 1..15: mol_type = other DNA
aggaagttccaagtt

SEQ ID NO: 1310 - DNA, 15 bp, synthetic construct
  source 1..15: mol_type = other DNA
aagtgacgacgtcag

SEQ ID NO: 1311 - DNA, 15 bp, synthetic construct
  source 1..15: mol_type = other DNA
ggaggtctccttgag

SEQ ID NO: 1312 - DNA, 15 bp, synthetic construct
  source 1..15: mol_type = other DNA
acgtccaccaactga

SEQ ID NO: 1313 - DNA, 15 bp, synthetic construct
  source 1..15: mol_type = other DNA
atcaccacctctacc

SEQ ID NO: 1314 - DNA, 15 bp, synthetic construct
  source 1..15: mol_type = other DNA
cccaagactaagttc

SEQ ID NO: 1315 - DNA, 15 bp, synthetic construct
  source 1..15: mol_type = other DNA
tgcgtcccatatctg

SEQ ID NO: 1316 - DNA, 15 bp, synthetic construct
  source 1..15: mol_type = other DNA
ggagagctctagtct

SEQ ID NO: 1317 - DNA, 15 bp, synthetic construct
  source 1..15: mol_type = other DNA
tgccaagggcctttc

SEQ ID NO: 1318 - DNA, 15 bp, synthetic construct
  source 1..15: mol_type = other DNA
gtatatagaagtatc

SEQ ID NO: 1319 - DNA, 15 bp, synthetic construct
  source 1..15: mol_type = other DNA
gattggtgaacgagt

SEQ ID NO: 1320 - DNA, 15 bp, synthetic construct
  source 1..15: mol_type = other DNA
caaaaatgcattgtt

SEQ ID NO: 1321 - DNA, 15 bp, synthetic construct
  source 1..15: mol_type = other DNA
ccattcaaaagagca

SEQ ID NO: 1322 - DNA, 15 bp, synthetic construct
  source 1..15: mol_type = other DNA
tcctctaaggagcaa

SEQ ID NO: 1323 - DNA, 15 bp, synthetic construct
  source 1..15: mol_type = other DNA
ccccctcaaactact

SEQ ID NO: 1324 - DNA, 15 bp, synthetic construct
  source 1..15: mol_type = other DNA
gcaaaaatctttgag

SEQ ID NO: 1325 - DNA, 15 bp, synthetic construct
  source 1..15: mol_type = other DNA
attgacaaatttatt

SEQ ID NO: 1326 - DNA, 15 bp, synthetic construct
  source 1..15: mol_type = other DNA
taagttactgcatca

SEQ ID NO: 1327 - DNA, 15 bp, synthetic construct
  source 1..15: mol_type = other DNA
gttttgtgtacacca

SEQ ID NO: 1328 - DNA, 15 bp, synthetic construct
  source 1..15: mol_type = other DNA
cctttacactctgga

SEQ ID NO: 1329 - DNA, 15 bp, synthetic construct
  source 1..15: mol_type = other DNA
tcagtgtggagtcgt

SEQ ID NO: 1330 - DNA, 15 bp, synthetic construct
  source 1..15: mol_type = other DNA
tacaggaggaggaag

SEQ ID NO: 1331 - DNA, 15 bp, synthetic construct
  source 1..15: mol_type = other DNA
attccattccttgtc

SEQ ID NO: 1332 - DNA, 15 bp, synthetic construct
  source 1..15: mol_type = other DNA
tgttactgtcacaga

SEQ ID NO: 1333 - DNA, 15 bp, synthetic construct
  source 1..15: mol_type = other DNA
ttacctcgatggcag

SEQ ID NO: 1334 - DNA, 15 bp, synthetic construct
  source 1..15: mol_type = other DNA
gtgaatttcgtgtca

SEQ ID NO: 1335 - DNA, 15 bp, synthetic construct
  source 1..15: mol_type = other DNA
caagtggttgatctt

SEQ ID NO: 1336 - DNA, 15 bp, synthetic construct
  source 1..15: mol_type = other DNA
cctgaggcactggac

SEQ ID NO: 1337 - DNA, 15 bp, synthetic construct
  source 1..15: mol_type = other DNA
caagtggttgatctt

SEQ ID NO: 1338 - DNA, 15 bp, synthetic construct
  source 1..15: mol_type = other DNA
cctgaggcactggac

SEQ ID NO: 1339 - DNA, 15 bp, synthetic construct
  source 1..15: mol_type = other DNA
tagtagcttcttcct

SEQ ID NO: 1340 - DNA, 15 bp, synthetic construct
  source 1..15: mol_type = other DNA
agaaatttgaaggat

SEQ ID NO: 1341 - DNA, 15 bp, synthetic construct
  source 1..15: mol_type = other DNA
ggccctggtgaattt

SEQ ID NO: 1342 - DNA, 15 bp, synthetic construct
  source 1..15: mol_type = other DNA
acacataccctagag

SEQ ID NO: 1343 - DNA, 15 bp, synthetic construct
  source 1..15: mol_type = other DNA
tgacattaaatgtaa

SEQ ID NO: 1344 - DNA, 15 bp, synthetic construct
  source 1..15: mol_type = other DNA
accaacccaaactgt

SEQ ID NO: 1345 - DNA, 15 bp, synthetic construct
  source 1..15: mol_type = other DNA
ctaaacctgaggaag

SEQ ID NO: 1346 - DNA, 15 bp, synthetic construct
  source 1..15: mol_type = other DNA
acagattaccatcac

SEQ ID NO: 1347 - DNA, 15 bp, synthetic construct
  source 1..15: mol_type = other DNA
aagtgtttagatgat

SEQ ID NO: 1348 - DNA, 15 bp, synthetic construct
  source 1..15: mol_type = other DNA
aaatcggtttaacca

SEQ ID NO: 1349 - DNA, 15 bp, synthetic construct
  source 1..15: mol_type = other DNA
aatgtgtaggtgctt

SEQ ID NO: 1350 - DNA, 15 bp, synthetic construct
  source 1..15: mol_type = other DNA
caaaagcatgttaag

SEQ ID NO: 1351 - DNA, 15 bp, synthetic construct
  source 1..15: mol_type = other DNA
gttatgctactcgtt

SEQ ID NO: 1352 - DNA, 15 bp, synthetic construct
  source 1..15: mol_type = other DNA
tttgctcaggttatt

SEQ ID NO: 1353 - DNA, 15 bp, synthetic construct
  source 1..15: mol_type = other DNA
aataggcttctggaa

SEQ ID NO: 1354 - DNA, 15 bp, synthetic construct
  source 1..15: mol_type = other DNA
aagccacagttgcac

SEQ ID NO: 1355 - DNA, 15 bp, synthetic construct
  source 1..15: mol_type = other DNA
ttgtttatggcctaa

SEQ ID NO: 1356 - DNA, 15 bp, synthetic construct
  source 1..15: mol_type = other DNA
cggaggtgaaagacc

SEQ ID NO: 1357 - DNA, 15 bp, synthetic construct
  source 1..15: mol_type = other DNA
cttccaagctgatcc

SEQ ID NO: 1358 - DNA, 15 bp, synthetic construct
  source 1..15: mol_type = other DNA
aatcatcagaattca

SEQ ID NO: 1359 - DNA, 15 bp, synthetic construct
  source 1..15: mol_type = other DNA
cactgtaatttccaa

SEQ ID NO: 1360 - DNA, 15 bp, synthetic construct
  source 1..15: mol_type = other DNA
aaaccatgatagcaa

SEQ ID NO: 1361 - DNA, 15 bp, synthetic construct
  source 1..15: mol_type = other DNA
tttccaaagaagcaa

SEQ ID NO: 1362 - DNA, 15 bp, synthetic construct
  source 1..15: mol_type = other DNA
ttaatcaggattttt

SEQ ID NO: 1363 - DNA, 15 bp, synthetic construct
  source 1..15: mol_type = other DNA
cacagatacagtctt

SEQ ID NO: 1364 - DNA, 15 bp, synthetic construct
  source 1..15: mol_type = other DNA
gtattagttacatga

SEQ ID NO: 1365 - DNA, 15 bp, synthetic construct
  source 1..15: mol_type = other DNA
ggcccaacaaacacc

SEQ ID NO: 1366 - DNA, 15 bp, synthetic construct
  source 1..15: mol_type = other DNA
caaaaatgagagcaa

SEQ ID NO: 1367 - DNA, 15 bp, synthetic construct
  source 1..15: mol_type = other DNA
tcatgagttaattga

SEQ ID NO: 1368 - DNA, 15 bp, synthetic construct
  source 1..15: mol_type = other DNA
ttcagcttgaattgg

SEQ ID NO: 1369 - DNA, 15 bp, synthetic construct
  source 1..15: mol_type = other DNA
tgcacacatctgctc

SEQ ID NO: 1370 - DNA, 15 bp, synthetic construct
  source 1..15: mol_type = other DNA
agttggcaaattttt

SEQ ID NO: 1371 - DNA, 15 bp, synthetic construct
  source 1..15: mol_type = other DNA
cagctgagatgttca

SEQ ID NO: 1372 - DNA, 15 bp, synthetic construct
  source 1..15: mol_type = other DNA
acaaagttatgtttt

SEQ ID NO: 1373 - DNA, 15 bp, synthetic construct
  source 1..15: mol_type = other DNA
tccaaaagccctgat

SEQ ID NO: 1374 - DNA, 15 bp, synthetic construct
  source 1..15: mol_type = other DNA
ctaggccagtacctg

SEQ ID NO: 1375 - DNA, 15 bp, synthetic construct
  source 1..15: mol_type = other DNA
atttctctgctagag

SEQ ID NO: 1376 - DNA, 15 bp, synthetic construct
  source 1..15: mol_type = other DNA
ttaatgattgttggt

SEQ ID NO: 1377 - DNA, 15 bp, synthetic construct
  source 1..15: mol_type = other DNA
agcacagaaagctgt

SEQ ID NO: 1378 - DNA, 15 bp, synthetic construct
  source 1..15: mol_type = other DNA
ggataaatccagtaa

SEQ ID NO: 1379 - DNA, 15 bp, synthetic construct
  source 1..15: mol_type = other DNA
ctccagattgtcata

SEQ ID NO: 1380 - DNA, 15 bp, synthetic construct
  source 1..15: mol_type = other DNA
ccttactttaaccat

SEQ ID NO: 1381 - DNA, 15 bp, synthetic construct
  source 1..15: mol_type = other DNA
catttcacttacaaa

SEQ ID NO: 1382 - DNA, 15 bp, synthetic construct
  source 1..15: mol_type = other DNA
ctgtgatccatcacc

SEQ ID NO: 1383 - DNA, 15 bp, synthetic construct
  source 1..15: mol_type = other DNA
gttccttgtctatcc

SEQ ID NO: 1384 - DNA, 15 bp, synthetic construct
  source 1..15: mol_type = other DNA
cactgggtagttgtt

SEQ ID NO: 1385 - DNA, 15 bp, synthetic construct
  source 1..15: mol_type = other DNA
cacttcttagtcaac

SEQ ID NO: 1386 - DNA, 15 bp, synthetic construct
  source 1..15: mol_type = other DNA
ccatccaacctgact

SEQ ID NO: 1387 - DNA, 15 bp, synthetic construct
  source 1..15: mol_type = other DNA
cctccctgaaaaaga

SEQ ID NO: 1388 - DNA, 15 bp, synthetic construct
  source 1..15: mol_type = other DNA
gaatatgtgtttgcc

SEQ ID NO: 1389 - DNA, 15 bp, synthetic construct
  source 1..15: mol_type = other DNA
gacaatggaaaacac

SEQ ID NO: 1390 - DNA, 15 bp, synthetic construct
  source 1..15: mol_type = other DNA
gttttatcactgtgt

SEQ ID NO: 1391 - DNA, 15 bp, synthetic construct
  source 1..15: mol_type = other DNA
gttcaaaacacaccg

SEQ ID NO: 1392 - DNA, 15 bp, synthetic construct
  source 1..15: mol_type = other DNA
tattttgcctccctt

SEQ ID NO: 1393 - DNA, 15 bp, synthetic construct
  source 1..15: mol_type = other DNA
ccaccagtcaataag

SEQ ID NO: 1394 - DNA, 15 bp, synthetic construct
  source 1..15: mol_type = other DNA
gatgggtgcagtttt

SEQ ID NO: 1395 - DNA, 15 bp, synthetic construct
  source 1..15: mol_type = other DNA
cttatcgaatcacat

SEQ ID NO: 1396 - DNA, 15 bp, synthetic construct
  source 1..15: mol_type = other DNA
acatagcattttgtt

SEQ ID NO: 1397 - DNA, 15 bp, synthetic construct
  source 1..15: mol_type = other DNA
tagggttatggcttc

SEQ ID NO: 1398 - DNA, 15 bp, synthetic construct
  source 1..15: mol_type = other DNA
tgcctatctgtataa

SEQ ID NO: 1399 - DNA, 15 bp, synthetic construct
  source 1..15: mol_type = other DNA
tcccagttcctgtgg

SEQ ID NO: 1400 - DNA, 15 bp, synthetic construct
  source 1..15: mol_type = other DNA
agtgttcagattttt

SEQ ID NO: 1401 - DNA, 15 bp, synthetic construct
  source 1..15: mol_type = other DNA
tagaaaaatactcaa

SEQ ID NO: 1402 - DNA, 15 bp, synthetic construct
  source 1..15: mol_type = other DNA
tttacatcttccttt

SEQ ID NO: 1403 - DNA, 15 bp, synthetic construct
  source 1..15: mol_type = other DNA
tatgttctttacgac

SEQ ID NO: 1404 - DNA, 15 bp, synthetic construct
  source 1..15: mol_type = other DNA
tgcttagcgattttt

SEQ ID NO: 1405 - DNA, 15 bp, synthetic construct
  source 1..15: mol_type = other DNA
caaccataaacatga

SEQ ID NO: 1406 - DNA, 15 bp, synthetic construct
  source 1..15: mol_type = other DNA
gaagttaatctgtga

SEQ ID NO: 1407 - DNA, 15 bp, synthetic construct
  source 1..15: mol_type = other DNA
tatttcgcataagct

SEQ ID NO: 1408 - DNA, 15 bp, synthetic construct
  source 1..15: mol_type = other DNA
aagtttcttctcttt

SEQ ID NO: 1409 - DNA, 15 bp, synthetic construct
  source 1..15: mol_type = other DNA
tcactactaggagat

SEQ ID NO: 1410 - DNA, 15 bp, synthetic construct
  source 1..15: mol_type = other DNA
gaactaacctcataa

SEQ ID NO: 1411 - DNA, 15 bp, synthetic construct
  source 1..15: mol_type = other DNA
ccaaatcacagcttt

SEQ ID NO: 1412 - DNA, 15 bp, synthetic construct
  source 1..15: mol_type = other DNA
tgccatcagactgct

SEQ ID NO: 1413 - DNA, 15 bp, synthetic construct
  source 1..15: mol_type = other DNA
ttgttgtaaaaagtt

SEQ ID NO: 1414 - DNA, 15 bp, synthetic construct
  source 1..15: mol_type = other DNA
aaaatactggatttg

SEQ ID NO: 1415 - DNA, 15 bp, synthetic construct
  source 1..15: mol_type = other DNA
aaagtcaattggcat

SEQ ID NO: 1416 - DNA, 15 bp, synthetic construct
  source 1..15: mol_type = other DNA
tgagtgtgccaatta

SEQ ID NO: 1417 - DNA, 15 bp, synthetic construct
  source 1..15: mol_type = other DNA
ccatttacgtaaagg

SEQ ID NO: 1418 - DNA, 15 bp, synthetic construct
  source 1..15: mol_type = other DNA
gtcatggaagcccta

SEQ ID NO: 1419 - DNA, 15 bp, synthetic construct
  source 1..15: mol_type = other DNA
gatgacacctacctt

SEQ ID NO: 1420 - DNA, 15 bp, synthetic construct
  source 1..15: mol_type = other DNA
gccagtgttaatttt

SEQ ID NO: 1421 - DNA, 15 bp, synthetic construct
  source 1..15: mol_type = other DNA
gtacttcacttctgc

SEQ ID NO: 1422 - DNA, 15 bp, synthetic construct
  source 1..15: mol_type = other DNA
gcgtagctcgctaag

SEQ ID NO: 1423 - DNA, 15 bp, synthetic construct
  source 1..15: mol_type = other DNA
gagatcacttaccgc

SEQ ID NO: 1424 - DNA, 15 bp, synthetic construct
  source 1..15: mol_type = other DNA
ctcgctgtcctagtc

SEQ ID NO: 1425 - DNA, 15 bp, synthetic construct
  source 1..15: mol_type = other DNA
aaggtgggagactgg

SEQ ID NO: 1426 - DNA, 15 bp, synthetic construct
  source 1..15: mol_type = other DNA
acccaacagcttaac

SEQ ID NO: 1427 - DNA, 15 bp, synthetic construct
  source 1..15: mol_type = other DNA
ctttgatcatacaca

SEQ ID NO: 1428 - DNA, 15 bp, synthetic construct
  source 1..15: mol_type = other DNA
tcctgatgtctgctg

SEQ ID NO: 1429 - DNA, 15 bp, synthetic construct
  source 1..15: mol_type = other DNA
cccttacatccatgc

SEQ ID NO: 1430 - DNA, 15 bp, synthetic construct
  source 1..15: mol_type = other DNA
caaggatcttatgac

SEQ ID NO: 1431 - DNA, 15 bp, synthetic construct
  source 1..15: mol_type = other DNA
attgctcaatttttg

SEQ ID NO: 1432 - DNA, 15 bp, synthetic construct
  source 1..15: mol_type = other DNA
tagttgggtgatggg

SEQ ID NO: 1433 - DNA, 15 bp, synthetic construct
  source 1..15: mol_type = other DNA
ggtgtgtctactccc

SEQ ID NO: 1434 - DNA, 15 bp, synthetic construct
  source 1..15: mol_type = other DNA
caggacaacttctcg

SEQ ID NO: 1435 - DNA, 15 bp, synthetic construct
  source 1..15: mol_type = other DNA
tgagggagttttgct

SEQ ID NO: 1436 - DNA, 15 bp, synthetic construct
  source 1..15: mol_type = other DNA
gatttcagggaagat

SEQ ID NO: 1437 - DNA, 15 bp, synthetic construct
  source 1..15: mol_type = other DNA
cagacactgaggtgc

SEQ ID NO: 1438 - DNA, 15 bp, synthetic construct
  source 1..15: mol_type = other DNA
gaaatatttgagcca

SEQ ID NO: 1439 - DNA, 15 bp, synthetic construct
  source 1..15: mol_type = other DNA
tctcagctacacatt

SEQ ID NO: 1440 - DNA, 15 bp, synthetic construct
  source 1..15: mol_type = other DNA
aagcagccgtttgtg

SEQ ID NO: 1441 - DNA, 15 bp, synthetic construct
  source 1..15: mol_type = other DNA
ctgtgaagtccagag

SEQ ID NO: 1442 - DNA, 15 bp, synthetic construct
  source 1..15: mol_type = other DNA
aggctacaggcaatc

SEQ ID NO: 1443 - DNA, 15 bp, synthetic construct
  source 1..15: mol_type = other DNA
tcttgtccttccaag

SEQ ID NO: 1444 - DNA, 15 bp, synthetic construct
  source 1..15: mol_type = other DNA
accagctggtgctag

SEQ ID NO: 1445 - DNA, 15 bp, synthetic construct
  source 1..15: mol_type = other DNA
gtgcatgccatatat

SEQ ID NO: 1446 - DNA, 15 bp, synthetic construct
  source 1..15: mol_type = other DNA
atccacaatgagagt

SEQ ID NO: 1447 - DNA, 15 bp, synthetic construct
  source 1..15: mol_type = other DNA
caggtatgaaggtgg

SEQ ID NO: 1448 - DNA, 15 bp, synthetic construct
  source 1..15: mol_type = other DNA
cacctttcacccttt

SEQ ID NO: 1449 - DNA, 15 bp, synthetic construct
  source 1..15: mol_type = other DNA
ttcccccagactatg

SEQ ID NO: 1450 - DNA, 15 bp, synthetic construct
  source 1..15: mol_type = other DNA
cccgttaagaaagcg

SEQ ID NO: 1451 - DNA, 15 bp, synthetic construct
  source 1..15: mol_type = other DNA
atttcggcagctaca

SEQ ID NO: 1452 - DNA, 15 bp, synthetic construct
  source 1..15: mol_type = other DNA
gaaatgaccccgata

SEQ ID NO: 1453 - DNA, 15 bp, synthetic construct
  source 1..15: mol_type = other DNA
caacaagcagctgaa

SEQ ID NO: 1454 - DNA, 15 bp, synthetic construct
  source 1..15: mol_type = other DNA
tcgtttggctcggta

SEQ ID NO: 1455 - DNA, 15 bp, synthetic construct
  source 1..15: mol_type = other DNA
atgaatcttctggtc

SEQ ID NO: 1456 - DNA, 15 bp, synthetic construct
  source 1..15: mol_type = other DNA
tataaaaagcagcga

SEQ ID NO: 1457 - DNA, 15 bp, synthetic construct
  source 1..15: mol_type = other DNA
ttctggcaatacttt

SEQ ID NO: 1458 - DNA, 15 bp, synthetic construct
  source 1..15: mol_type = other DNA
tgcagcttcgagaac

SEQ ID NO: 1459 - DNA, 15 bp, synthetic construct
  source 1..15: mol_type = other DNA
ggaaactgaaaagcg

SEQ ID NO: 1460 - DNA, 15 bp, synthetic construct
  source 1..15: mol_type = other DNA
ttgttgttccaactg

SEQ ID NO: 1461 - DNA, 15 bp, synthetic construct
  source 1..15: mol_type = other DNA
acagcaaagcatgaa

SEQ ID NO: 1462 - DNA, 15 bp, synthetic construct
  source 1..15: mol_type = other DNA
gtggagttgaggatg

SEQ ID NO: 1463 - DNA, 15 bp, synthetic construct
  source 1..15: mol_type = other DNA
catctactccatcgt

SEQ ID NO: 1464 - DNA, 15 bp, synthetic construct
  source 1..15: mol_type = other DNA
actgaggagttgacg

SEQ ID NO: 1465 - DNA, 15 bp, synthetic construct
  source 1..15: mol_type = other DNA
aaaagcttctccaag

SEQ ID NO: 1466 - DNA, 15 bp, synthetic construct
  source 1..15: mol_type = other DNA
aaggcaagcaagatc

SEQ ID NO: 1467 - DNA, 15 bp, synthetic construct
  source 1..15: mol_type = other DNA
agaccagaagtcaga

SEQ ID NO: 1468 - DNA, 15 bp, synthetic construct
  source 1..15: mol_type = other DNA
tggttctgaatgttt

SEQ ID NO: 1469 - DNA, 15 bp, synthetic construct
  source 1..15: mol_type = other DNA
agctgcatacccaaa

SEQ ID NO: 1470 - DNA, 15 bp, synthetic construct
  source 1..15: mol_type = other DNA
tgcgttttgtcactg

SEQ ID NO: 1471 - DNA, 15 bp, synthetic construct
  source 1..15: mol_type = other DNA
gttgttctcggaagg

SEQ ID NO: 1472 - DNA, 15 bp, synthetic construct
  source 1..15: mol_type = other DNA
cttgctcctctgtag

SEQ ID NO: 1473 - DNA, 15 bp, synthetic construct
  source 1..15: mol_type = other DNA
tcctgagtaagtgtc

SEQ ID NO: 1474 - DNA, 15 bp, synthetic construct
  source 1..15: mol_type = other DNA
ttcagactaggattg

SEQ ID NO: 1475 - DNA, 15 bp, synthetic construct
  source 1..15: mol_type = other DNA
ttgatagcagaattc

SEQ ID NO: 1476 - DNA, 15 bp, synthetic construct
  source 1..15: mol_type = other DNA
aacacaggaatgctt

SEQ ID NO: 1477 - DNA, 15 bp, synthetic construct
  source 1..15: mol_type = other DNA
aaaattgagtatgga

SEQ ID NO: 1478 - DNA, 15 bp, synthetic construct
  source 1..15: mol_type = other DNA
ttgcagaacttaact

SEQ ID NO: 1479 - DNA, 15 bp, synthetic construct
  source 1..15: mol_type = other DNA
accttgttcatacta

SEQ ID NO: 1480 - DNA, 15 bp, synthetic construct
  source 1..15: mol_type = other DNA
caagagcatcattcc

SEQ ID NO: 1481 - DNA, 15 bp, synthetic construct
  source 1..15: mol_type = other DNA
tgctgtgccctctaa

SEQ ID NO: 1482 - DNA, 15 bp, synthetic construct
  source 1..15: mol_type = other DNA
agggaatattcacac

SEQ ID NO: 1483 - DNA, 15 bp, synthetic construct
  source 1..15: mol_type = other DNA
ctgtagtgtagaagc

SEQ ID NO: 1484 - DNA, 15 bp, synthetic construct
  source 1..15: mol_type = other DNA
agttctagctgctca

SEQ ID NO: 1485 - DNA, 15 bp, synthetic construct
  source 1..15: mol_type = other DNA
caatgcagattttgg

SEQ ID NO: 1486 - DNA, 15 bp, synthetic construct
  source 1..15: mol_type = other DNA
gtttgagatgatcaa

SEQ ID NO: 1487 - DNA, 15 bp, synthetic construct
  source 1..15: mol_type = other DNA
gcggttctttgcagg

SEQ ID NO: 1488 - DNA, 15 bp, synthetic construct
  source 1..15: mol_type = other DNA
caattgggattcctc

SEQ ID NO: 1489 - DNA, 15 bp, synthetic construct
  source 1..15: mol_type = other DNA
ttacttatgaggaaa

SEQ ID NO: 1490 - DNA, 15 bp, synthetic construct
  source 1..15: mol_type = other DNA
aaatgggaacgtgat

SEQ ID NO: 1491 - DNA, 15 bp, synthetic construct
  source 1..15: mol_type = other DNA
acaccaaagtttcag

SEQ ID NO: 1492 - DNA, 15 bp, synthetic construct
  source 1..15: mol_type = other DNA
gtattagcagccaga

SEQ ID NO: 1493 - DNA, 15 bp, synthetic construct
  source 1..15: mol_type = other DNA
atatcagagaacttg

SEQ ID NO: 1494 - DNA, 15 bp, synthetic construct
  source 1..15: mol_type = other DNA
tagaagaacacaatg

SEQ ID NO: 1495 - DNA, 15 bp, synthetic construct
  source 1..15: mol_type = other DNA
ttcatatgtgctcag

SEQ ID NO: 1496 - DNA, 15 bp, synthetic construct
  source 1..15: mol_type = other DNA
tcctcagatatttgc

SEQ ID NO: 1497 - DNA, 15 bp, synthetic construct
  source 1..15: mol_type = other DNA
gatgtctgcactagt

SEQ ID NO: 1498 - DNA, 15 bp, synthetic construct
  source 1..15: mol_type = other DNA
ataattcactttgtg

SEQ ID NO: 1499 - DNA, 15 bp, synthetic construct
  source 1..15: mol_type = other DNA
tcctctttcaatctg

SEQ ID NO: 1500 - DNA, 15 bp, synthetic construct
  source 1..15: mol_type = other DNA
tggaatcatcaatgg

SEQ ID NO: 1501 - DNA, 15 bp, synthetic construct
  source 1..15: mol_type = other DNA
cacagagaaatggct

SEQ ID NO: 1502 - DNA, 15 bp, synthetic construct
  source 1..15: mol_type = other DNA
cctttgtgacatcca

SEQ ID NO: 1503 - DNA, 15 bp, synthetic construct
  source 1..15: mol_type = other DNA
tgttgatcttgtctc

SEQ ID NO: 1504 - DNA, 15 bp, synthetic construct
  source 1..15: mol_type = other DNA
actccaaacttcctc

SEQ ID NO: 1505 - DNA, 15 bp, synthetic construct
  source 1..15: mol_type = other DNA
caagctacgttgaat

SEQ ID NO: 1506 - DNA, 15 bp, synthetic construct
  source 1..15: mol_type = other DNA
gttagtttttgctct

SEQ ID NO: 1507 - DNA, 15 bp, synthetic construct
  source 1..15: mol_type = other DNA
aggtgtgtggagaaa

SEQ ID NO: 1508 - DNA, 15 bp, synthetic construct
  source 1..15: mol_type = other DNA
aaactggatcatccc

SEQ ID NO: 1509 - DNA, 15 bp, synthetic construct
  source 1..15: mol_type = other DNA
tttccccttctctct

SEQ ID NO: 1510 - DNA, 15 bp, synthetic construct
  source 1..15: mol_type = other DNA
caactgtttggaagc

SEQ ID NO: 1511 - DNA, 15 bp, synthetic construct
  source 1..15: mol_type = other DNA
tctgcagattaaatt

SEQ ID NO: 1512 - DNA, 15 bp, synthetic construct
  source 1..15: mol_type = other DNA
ggtgttcctgatgtc

SEQ ID NO: 1513 - DNA, 15 bp, synthetic construct
  source 1..15: mol_type = other DNA
ggaaatgtgtagggg

SEQ ID NO: 1514 - DNA, 15 bp, synthetic construct
  source 1..15: mol_type = other DNA
aaacagtgctcttga

SEQ ID NO: 1515 - DNA, 15 bp, synthetic construct
  source 1..15: mol_type = other DNA
gtgtggagtttaaga

SEQ ID NO: 1516 - DNA, 15 bp, synthetic construct
  source 1..15: mol_type = other DNA
agttgacatgaaacc

SEQ ID NO: 1517 - DNA, 15 bp, synthetic construct
  source 1..15: mol_type = other DNA
gctgacgttatccct

SEQ ID NO: 1518 - DNA, 15 bp, synthetic construct
  source 1..15: mol_type = other DNA
ggtgcataaaagatc

SEQ ID NO: 1519 - DNA, 15 bp, synthetic construct
  source 1..15: mol_type = other DNA
tgactaaaccagcaa

SEQ ID NO: 1520 - DNA, 15 bp, synthetic construct
  source 1..15: mol_type = other DNA
ttgtggcatattaag

SEQ ID NO: 1521 - DNA, 15 bp, synthetic construct
  source 1..15: mol_type = other DNA
gaacattccctaaaa

SEQ ID NO: 1522 - DNA, 15 bp, synthetic construct
  source 1..15: mol_type = other DNA
cggagaacgtcctta

SEQ ID NO: 1523 - DNA, 15 bp, synthetic construct
  source 1..15: mol_type = other DNA
acatccagtcgtagc

SEQ ID NO: 1524 - DNA, 15 bp, synthetic construct
  source 1..15: mol_type = other DNA
tgccctgaggatata

SEQ ID NO: 1525 - DNA, 15 bp, synthetic construct
  source 1..15: mol_type = other DNA
aaaggtggacaaaga

SEQ ID NO: 1526 - DNA, 15 bp, synthetic construct
  source 1..15: mol_type = other DNA
ccacaacagatccta

SEQ ID NO: 1527 - DNA, 15 bp, synthetic construct
  source 1..15: mol_type = other DNA
tttagatgttgaaaa

SEQ ID NO: 1528 - DNA, 15 bp, synthetic construct
  source 1..15: mol_type = other DNA
ttctaattctacctg

SEQ ID NO: 1529 - DNA, 15 bp, synthetic construct
  source 1..15: mol_type = other DNA
tttagatgttgaaaa

SEQ ID NO: 1530 - DNA, 15 bp, synthetic construct
  source 1..15: mol_type = other DNA
ttctaattctacctg

SEQ ID NO: 1531 - DNA, 15 bp, synthetic construct
  source 1..15: mol_type = other DNA
ctttggacatttttt

SEQ ID NO: 1532 - DNA, 15 bp, synthetic construct
  source 1..15: mol_type = other DNA
gatgttcttgaatac

SEQ ID NO: 1533 - DNA, 15 bp, synthetic construct
  source 1..15: mol_type = other DNA
ctttggacatttttt

SEQ ID NO: 1534 - DNA, 15 bp, synthetic construct
  source 1..15: mol_type = other DNA
gatgttcttgaatac

SEQ ID NO: 1535 - DNA, 15 bp, synthetic construct
  source 1..15: mol_type = other DNA
gggtagtagtcatct

SEQ ID NO: 1536 - DNA, 15 bp, synthetic construct
  source 1..15: mol_type = other DNA
tcaattgctgctgct

SEQ ID NO: 1537 - DNA, 15 bp, synthetic construct
  source 1..15: mol_type = other DNA
gcaaagcaaagaatc

SEQ ID NO: 1538 - DNA, 15 bp, synthetic construct
  source 1..15: mol_type = other DNA
cattccacacaagtg

SEQ ID NO: 1539 - DNA, 15 bp, synthetic construct
  source 1..15: mol_type = other DNA
gcctggtatcttagt

SEQ ID NO: 1540 - DNA, 15 bp, synthetic construct
  source 1..15: mol_type = other DNA
tccccattgaagtcg

SEQ ID NO: 1541 - DNA, 15 bp, synthetic construct
  source 1..15: mol_type = other DNA
ctagccacgctaatg

SEQ ID NO: 1542 - DNA, 15 bp, synthetic construct
  source 1..15: mol_type = other DNA
tacactatgtgcact

SEQ ID NO: 1543 - DNA, 15 bp, synthetic construct
  source 1..15: mol_type = other DNA
aatagttctgggttt

SEQ ID NO: 1544 - DNA, 15 bp, synthetic construct
  source 1..15: mol_type = other DNA
tatagtatggccaag

SEQ ID NO: 1545 - DNA, 15 bp, synthetic construct
  source 1..15: mol_type = other DNA
tagagatgggccttc

SEQ ID NO: 1546 - DNA, 15 bp, synthetic construct
  source 1..15: mol_type = other DNA
caatgcactggaatc

SEQ ID NO: 1547 - DNA, 15 bp, synthetic construct
  source 1..15: mol_type = other DNA
tgtctttgccgtaga

SEQ ID NO: 1548 - DNA, 15 bp, synthetic construct
  source 1..15: mol_type = other DNA
gaatgctcatcatcg

SEQ ID NO: 1549 - DNA, 15 bp, synthetic construct
  source 1..15: mol_type = other DNA
cccattaagatggag

SEQ ID NO: 1550 - DNA, 15 bp, synthetic construct
  source 1..15: mol_type = other DNA
caaacctgtcttggt

SEQ ID NO: 1551 - DNA, 15 bp, synthetic construct
  source 1..15: mol_type = other DNA
atgatgttggactgg

SEQ ID NO: 1552 - DNA, 15 bp, synthetic construct
  source 1..15: mol_type = other DNA
tatgtgctcgtcaaa

SEQ ID NO: 1553 - DNA, 15 bp, synthetic construct
  source 1..15: mol_type = other DNA
ctcttcctcatggac

SEQ ID NO: 1554 - DNA, 15 bp, synthetic construct
  source 1..15: mol_type = other DNA
ctctttccttttggc

SEQ ID NO: 1555 - DNA, 15 bp, synthetic construct
  source 1..15: mol_type = other DNA
aagaagctgcttccc

SEQ ID NO: 1556 - DNA, 15 bp, synthetic construct
  source 1..15: mol_type = other DNA
gtccagtgcacacga

SEQ ID NO: 1557 - DNA, 15 bp, synthetic construct
  source 1..15: mol_type = other DNA
gattcaggagaacga

SEQ ID NO: 1558 - DNA, 15 bp, synthetic construct
  source 1..15: mol_type = other DNA
tttctggttccagat

SEQ ID NO: 1559 - DNA, 15 bp, synthetic construct
  source 1..15: mol_type = other DNA
cgtcttcttcctttc

SEQ ID NO: 1560 - DNA, 15 bp, synthetic construct
  source 1..15: mol_type = other DNA
cctggaaagtcatgt

SEQ ID NO: 1561 - DNA, 15 bp, synthetic construct
  source 1..15: mol_type = other DNA
tgcgagaagttctac

SEQ ID NO: 1562 - DNA, 15 bp, synthetic construct
  source 1..15: mol_type = other DNA
agtaggaggtcctct

SEQ ID NO: 1563 - DNA, 15 bp, synthetic construct
  source 1..15: mol_type = other DNA
tgttgtacgtttcct

SEQ ID NO: 1564 - DNA, 15 bp, synthetic construct
  source 1..15: mol_type = other DNA
gagagattgatctca

SEQ ID NO: 1565 - DNA, 15 bp, synthetic construct
  source 1..15: mol_type = other DNA
gattgaagtgaaagc

SEQ ID NO: 1566 - DNA, 15 bp, synthetic construct
  source 1..15: mol_type = other DNA
atgttatggagaaac

SEQ ID NO: 1567 - DNA, 15 bp, synthetic construct
  source 1..15: mol_type = other DNA
ccttttgcattgaga

SEQ ID NO: 1568 - DNA, 15 bp, synthetic construct
  source 1..15: mol_type = other DNA
ggaagatagttgaaa

SEQ ID NO: 1569 - DNA, 15 bp, synthetic construct
  source 1..15: mol_type = other DNA
ttcttttctgtctgt

SEQ ID NO: 1570 - DNA, 15 bp, synthetic construct
  source 1..15: mol_type = other DNA
tatgaacttgcactc

SEQ ID NO: 1571 - DNA, 15 bp, synthetic construct
  source 1..15: mol_type = other DNA
gcctctgttcttggc

SEQ ID NO: 1572 - DNA, 15 bp, synthetic construct
  source 1..15: mol_type = other DNA
agcttcttcagattg

SEQ ID NO: 1573 - DNA, 15 bp, synthetic construct
  source 1..15: mol_type = other DNA
ttcggaatcagactt

SEQ ID NO: 1574 - DNA, 15 bp, synthetic construct
  source 1..15: mol_type = other DNA
tcactgaccgcaatg

SEQ ID NO: 1575 - DNA, 15 bp, synthetic construct
  source 1..15: mol_type = other DNA
gacattctgccatct

SEQ ID NO: 1576 - DNA, 15 bp, synthetic construct
  source 1..15: mol_type = other DNA
ctggtaagacaccca

SEQ ID NO: 1577 - DNA, 15 bp, synthetic construct
  source 1..15: mol_type = other DNA
ctgagacatcatttg

SEQ ID NO: 1578 - DNA, 15 bp, synthetic construct
  source 1..15: mol_type = other DNA
tgagtaccgaggaca

SEQ ID NO: 1579 - DNA, 15 bp, synthetic construct
  source 1..15: mol_type = other DNA
gttggtgaattctgg

SEQ ID NO: 1580 - DNA, 15 bp, synthetic construct
  source 1..15: mol_type = other DNA
tcttgtggccactct

SEQ ID NO: 1581 - DNA, 15 bp, synthetic construct
  source 1..15: mol_type = other DNA
agtcctgtgctcctg

SEQ ID NO: 1582 - DNA, 15 bp, synthetic construct
  source 1..15: mol_type = other DNA
tcacagaacatcatg

SEQ ID NO: 1583 - DNA, 15 bp, synthetic construct
  source 1..15: mol_type = other DNA
cctttttgcagatta

SEQ ID NO: 1584 - DNA, 15 bp, synthetic construct
  source 1..15: mol_type = other DNA
ttgataacagtcaac

SEQ ID NO: 1585 - DNA, 15 bp, synthetic construct
  source 1..15: mol_type = other DNA
gttaacgactctgac

SEQ ID NO: 1586 - DNA, 15 bp, synthetic construct
  source 1..15: mol_type = other DNA
ggcctggatggatcg

SEQ ID NO: 1587 - DNA, 15 bp, synthetic construct
  source 1..15: mol_type = other DNA
atttttcagttaata

SEQ ID NO: 1588 - DNA, 15 bp, synthetic construct
  source 1..15: mol_type = other DNA
tccggaggcgattct

SEQ ID NO: 1589 - DNA, 15 bp, synthetic construct
  source 1..15: mol_type = other DNA
actgtagccatccga

SEQ ID NO: 1590 - DNA, 15 bp, synthetic construct
  source 1..15: mol_type = other DNA
gatggttttgtttcg

SEQ ID NO: 1591 - DNA, 15 bp, synthetic construct
  source 1..15: mol_type = other DNA
cctatcccctcggtc

SEQ ID NO: 1592 - DNA, 15 bp, synthetic construct
  source 1..15: mol_type = other DNA
gcagggctgtagcga

SEQ ID NO: 1593 - DNA, 15 bp, synthetic construct
  source 1..15: mol_type = other DNA
tgatctgcaagaacc

SEQ ID NO: 1594 - DNA, 15 bp, synthetic construct
  source 1..15: mol_type = other DNA
cagctcgttctcaag

SEQ ID NO: 1595 - DNA, 15 bp, synthetic construct
  source 1..15: mol_type = other DNA
catctggaagaagtt

SEQ ID NO: 1596 - DNA, 15 bp, synthetic construct
  source 1..15: mol_type = other DNA
cagcttctcgctcac

SEQ ID NO: 1597 - DNA, 15 bp, synthetic construct
  source 1..15: mol_type = other DNA
ccaggactgcatgtg

SEQ ID NO: 1598 - DNA, 15 bp, synthetic construct
  source 1..15: mol_type = other DNA
tcgcgcttgttcacg

SEQ ID NO: 1599 - DNA, 15 bp, synthetic construct
  source 1..15: mol_type = other DNA
ccgagtgcgtggatc

SEQ ID NO: 1600 - DNA, 15 bp, synthetic construct
  source 1..15: mol_type = other DNA
acccgagttcggtct

SEQ ID NO: 1601 - DNA, 15 bp, synthetic construct
  source 1..15: mol_type = other DNA
cctccggagaggaca

SEQ ID NO: 1602 - DNA, 15 bp, synthetic construct
  source 1..15: mol_type = other DNA
gacatacgagcacta

SEQ ID NO: 1603 - DNA, 15 bp, synthetic construct
  source 1..15: mol_type = other DNA
agtaactagcatctt

SEQ ID NO: 1604 - DNA, 15 bp, synthetic construct
  source 1..15: mol_type = other DNA
actctccacgtaggg

SEQ ID NO: 1605 - DNA, 15 bp, synthetic construct
  source 1..15: mol_type = other DNA
aaacgatgccttccc

SEQ ID NO: 1606 - DNA, 15 bp, synthetic construct
  source 1..15: mol_type = other DNA
gaaagctggaccgaa

SEQ ID NO: 1607 - DNA, 15 bp, synthetic construct
  source 1..15: mol_type = other DNA
gactcggaggacagt

SEQ ID NO: 1608 - DNA, 15 bp, synthetic construct
  source 1..15: mol_type = other DNA
gagcgtgttcaattt

SEQ ID NO: 1609 - DNA, 15 bp, synthetic construct
  source 1..15: mol_type = other DNA
aaaaaggccactgag

SEQ ID NO: 1610 - DNA, 15 bp, synthetic construct
  source 1..15: mol_type = other DNA
tgaaagtaaaccaac

SEQ ID NO: 1611 - DNA, 15 bp, synthetic construct
  source 1..15: mol_type = other DNA
gcatatagccatgta

SEQ ID NO: 1612 - DNA, 15 bp, synthetic construct
  source 1..15: mol_type = other DNA
ttgtttctccccgtt

SEQ ID NO: 1613 - DNA, 15 bp, synthetic construct
  source 1..15: mol_type = other DNA
gtgctttaattccta

SEQ ID NO: 1614 - DNA, 15 bp, synthetic construct
  source 1..15: mol_type = other DNA
tcaaaagctttcatt

SEQ ID NO: 1615 - DNA, 15 bp, synthetic construct
  source 1..15: mol_type = other DNA
actgagggtctctaa

SEQ ID NO: 1616 - DNA, 15 bp, synthetic construct
  source 1..15: mol_type = other DNA
tttcagttcgttcat

SEQ ID NO: 1617 - DNA, 15 bp, synthetic construct
  source 1..15: mol_type = other DNA
atgcataagactcaa

SEQ ID NO: 1618 - DNA, 15 bp, synthetic construct
  source 1..15: mol_type = other DNA
agatcgtttcacaga

SEQ ID NO: 1619 - DNA, 15 bp, synthetic construct
  source 1..15: mol_type = other DNA
acatccctcatagag

SEQ ID NO: 1620 - DNA, 15 bp, synthetic construct
  source 1..15: mol_type = other DNA
atttgggagttgaca

SEQ ID NO: 1621 - DNA, 15 bp, synthetic construct
  source 1..15: mol_type = other DNA
ttatttaacgtgcta

SEQ ID NO: 1622 - DNA, 15 bp, synthetic construct
  source 1..15: mol_type = other DNA
cagatgaagaggcaa

SEQ ID NO: 1623 - DNA, 15 bp, synthetic construct
  source 1..15: mol_type = other DNA
ctctgaactttttcc

SEQ ID NO: 1624 - DNA, 15 bp, synthetic construct
  source 1..15: mol_type = other DNA
gattttcctcctttt

SEQ ID NO: 1625 - DNA, 15 bp, synthetic construct
  source 1..15: mol_type = other DNA
aatcaactattcacc

SEQ ID NO: 1626 - DNA, 15 bp, synthetic construct
  source 1..15: mol_type = other DNA
aatacttgggtgact

SEQ ID NO: 1627 - DNA, 15 bp, synthetic construct
  source 1..15: mol_type = other DNA
gtgactttaaccttg

SEQ ID NO: 1628 - DNA, 15 bp, synthetic construct
  source 1..15: mol_type = other DNA
gtctgtgaaatctga

SEQ ID NO: 1629 - DNA, 15 bp, synthetic construct
  source 1..15: mol_type = other DNA
gtctaagaaactgta

SEQ ID NO: 1630 - DNA, 15 bp, synthetic construct
  source 1..15: mol_type = other DNA
acaaggacggaacca

SEQ ID NO: 1631 - DNA, 15 bp, synthetic construct
  source 1..15: mol_type = other DNA
tggaagtaacttgtg

SEQ ID NO: 1632 - DNA, 15 bp, synthetic construct
  source 1..15: mol_type = other DNA
aaggaacattttggt

SEQ ID NO: 1633 - DNA, 15 bp, synthetic construct
  source 1..15: mol_type = other DNA
ccaggattacttcct

SEQ ID NO: 1634 - DNA, 15 bp, synthetic construct
  source 1..15: mol_type = other DNA
atgaatgcctttgtt

SEQ ID NO: 1635 - DNA, 15 bp, synthetic construct
  source 1..15: mol_type = other DNA
atagagtactcaggg

SEQ ID NO: 1636 - DNA, 15 bp, synthetic construct
  source 1..15: mol_type = other DNA
ataaaggcgcctact

SEQ ID NO: 1637 - DNA, 15 bp, synthetic construct
  source 1..15: mol_type = other DNA
cttaccttctgtcca

SEQ ID NO: 1638 - DNA, 15 bp, synthetic construct
  source 1..15: mol_type = other DNA
tttgcaatatgcact

SEQ ID NO: 1639 - DNA, 15 bp, synthetic construct
  source 1..15: mol_type = other DNA
aactgagactttaaa

SEQ ID NO: 1640 - DNA, 15 bp, synthetic construct
  source 1..15: mol_type = other DNA
acggcaaatatttga

SEQ ID NO: 1641 - DNA, 15 bp, synthetic construct
  source 1..15: mol_type = other DNA
aataatcccctgtca

SEQ ID NO: 1642 - DNA, 15 bp, synthetic construct
  source 1..15: mol_type = other DNA
ttaatgacattctct

SEQ ID NO: 1643 - DNA, 15 bp, synthetic construct
  source 1..15: mol_type = other DNA
ttttatatttggctc

SEQ ID NO: 1644 - DNA, 15 bp, synthetic construct
  source 1..15: mol_type = other DNA
acatctcaggagttc

SEQ ID NO: 1645 - DNA, 15 bp, synthetic construct
  source 1..15: mol_type = other DNA
cacttcatatcccag

SEQ ID NO: 1646 - DNA, 15 bp, synthetic construct
  source 1..15: mol_type = other DNA
tgtattccaggtttc

SEQ ID NO: 1647 - DNA, 15 bp, synthetic construct
  source 1..15: mol_type = other DNA
atgagcagagttttc

SEQ ID NO: 1648 - DNA, 15 bp, synthetic construct
  source 1..15: mol_type = other DNA
tgctgtgacatcact

SEQ ID NO: 1649 - DNA, 15 bp, synthetic construct
  source 1..15: mol_type = other DNA
ctcctaccatatttt

SEQ ID NO: 1650 - DNA, 15 bp, synthetic construct
  source 1..15: mol_type = other DNA
tcagcagtaaataaa

SEQ ID NO: 1651 - DNA, 15 bp, synthetic construct
  source 1..15: mol_type = other DNA
tatttttcaggtttc

SEQ ID NO: 1652 - DNA, 15 bp, synthetic construct
  source 1..15: mol_type = other DNA
tgttgtccaatcgtt

SEQ ID NO: 1653 - DNA, 15 bp, synthetic construct
  source 1..15: mol_type = other DNA
atcaagcatgacaat

SEQ ID NO: 1654 - DNA, 15 bp, synthetic construct
  source 1..15: mol_type = other DNA
tgtttgttgcaatga

SEQ ID NO: 1655 - DNA, 15 bp, synthetic construct
  source 1..15: mol_type = other DNA
cgtgtgatctgatta

SEQ ID NO: 1656 - DNA, 15 bp, synthetic construct
  source 1..15: mol_type = other DNA
tttgagactatgtgg

SEQ ID NO: 1657 - DNA, 15 bp, synthetic construct
  source 1..15: mol_type = other DNA
atctgacaaagtagg

SEQ ID NO: 1658 - DNA, 15 bp, synthetic construct
  source 1..15: mol_type = other DNA
ttctgatactttttg

SEQ ID NO: 1659 - DNA, 15 bp, synthetic construct
  source 1..15: mol_type = other DNA
ccctcatattgctac

SEQ ID NO: 1660 - DNA, 15 bp, synthetic construct
  source 1..15: mol_type = other DNA
attaggttgagtcat

SEQ ID NO: 1661 - DNA, 15 bp, synthetic construct
  source 1..15: mol_type = other DNA
gtacttgccagtgta

SEQ ID NO: 1662 - DNA, 15 bp, synthetic construct
  source 1..15: mol_type = other DNA
gcatataccagacct

SEQ ID NO: 1663 - DNA, 15 bp, synthetic construct
  source 1..15: mol_type = other DNA
cctacctgaggatga

SEQ ID NO: 1664 - DNA, 15 bp, synthetic construct
  source 1..15: mol_type = other DNA
aaataattcttctcc

SEQ ID NO: 1665 - DNA, 15 bp, synthetic construct
  source 1..15: mol_type = other DNA
ttacaactgctctta

SEQ ID NO: 1666 - DNA, 15 bp, synthetic construct
  source 1..15: mol_type = other DNA
ttttgatctctgtga

SEQ ID NO: 1667 - DNA, 15 bp, synthetic construct
  source 1..15: mol_type = other DNA
cttactcactgcaca

SEQ ID NO: 1668 - DNA, 15 bp, synthetic construct
  source 1..15: mol_type = other DNA
gctacgtattttccc

SEQ ID NO: 1669 - DNA, 15 bp, synthetic construct
  source 1..15: mol_type = other DNA
ggcacgccctgtagt

SEQ ID NO: 1670 - DNA, 15 bp, synthetic construct
  source 1..15: mol_type = other DNA
cctgattgcccttgc

SEQ ID NO: 1671 - DNA, 15 bp, synthetic construct
  source 1..15: mol_type = other DNA
atttggcatcttcca

SEQ ID NO: 1672 - DNA, 15 bp, synthetic construct
  source 1..15: mol_type = other DNA
agactgtatttttca

SEQ ID NO: 1673 - DNA, 15 bp, synthetic construct
  source 1..15: mol_type = other DNA
acacaaaccgccata

SEQ ID NO: 1674 - DNA, 15 bp, synthetic construct
  source 1..15: mol_type = other DNA
gcaatcgtatttggg

SEQ ID NO: 1675 - DNA, 15 bp, synthetic construct
  source 1..15: mol_type = other DNA
acacttacttaccat

SEQ ID NO: 1676 - DNA, 15 bp, synthetic construct
  source 1..15: mol_type = other DNA
aatgctgtgaagaat

SEQ ID NO: 1677 - DNA, 15 bp, synthetic construct
  source 1..15: mol_type = other DNA
ccagatattgatctt

SEQ ID NO: 1678 - DNA, 15 bp, synthetic construct
  source 1..15: mol_type = other DNA
tatggaatgctttca

SEQ ID NO: 1679 - DNA, 15 bp, synthetic construct
  source 1..15: mol_type = other DNA
tccagatgccaactt

SEQ ID NO: 1680 - DNA, 15 bp, synthetic construct
  source 1..15: mol_type = other DNA
gctgtacaggaacca

SEQ ID NO: 1681 - DNA, 15 bp, synthetic construct
  source 1..15: mol_type = other DNA
cactcaaacatgact

SEQ ID NO: 1682 - DNA, 15 bp, synthetic construct
  source 1..15: mol_type = other DNA
gaatacaaaaagagt

SEQ ID NO: 1683 - DNA, 15 bp, synthetic construct
  source 1..15: mol_type = other DNA
gagtagaccgcactg

SEQ ID NO: 1684 - DNA, 15 bp, synthetic construct
  source 1..15: mol_type = other DNA
ctgcagacttacttc

SEQ ID NO: 1685 - DNA, 15 bp, synthetic construct
  source 1..15: mol_type = other DNA
gaggctctgggaacc

SEQ ID NO: 1686 - DNA, 15 bp, synthetic construct
  source 1..15: mol_type = other DNA
aaccgttacttgtcg

SEQ ID NO: 1687 - DNA, 15 bp, synthetic construct
  source 1..15: mol_type = other DNA
tgaacactaggacaa

SEQ ID NO: 1688 - DNA, 15 bp, synthetic construct
  source 1..15: mol_type = other DNA
gtcctttagaacccc

SEQ ID NO: 1689 - DNA, 15 bp, synthetic construct
  source 1..15: mol_type = other DNA
gtcctttagaacccc

SEQ ID NO: 1690 - DNA, 15 bp, synthetic construct
  source 1..15: mol_type = other DNA
aatccacttcttccg

SEQ ID NO: 1691 - DNA, 15 bp, synthetic construct
  source 1..15: mol_type = other DNA
aggatctaggaaact

SEQ ID NO: 1692 - DNA, 15 bp, synthetic construct
  source 1..15: mol_type = other DNA
tgtggtttgtttttg

SEQ ID NO: 1693 - DNA, 15 bp, synthetic construct
  source 1..15: mol_type = other DNA
aagtcatcagcaaaa

SEQ ID NO: 1694 - DNA, 15 bp, synthetic construct
  source 1..15: mol_type = other DNA
tatggttggtttgaa

SEQ ID NO: 1695 - DNA, 15 bp, synthetic construct
  source 1..15: mol_type = other DNA
cagtagtagcttcaa

SEQ ID NO: 1696 - DNA, 15 bp, synthetic construct
  source 1..15: mol_type = other DNA
gagcagtacatcgac

SEQ ID NO: 1697 - DNA, 15 bp, synthetic construct
  source 1..15: mol_type = other DNA
cttggtaagctttct

SEQ ID NO: 1698 - DNA, 15 bp, synthetic construct
  source 1..15: mol_type = other DNA
catactccattagca

SEQ ID NO: 1699 - DNA, 15 bp, synthetic construct
  source 1..15: mol_type = other DNA
gttcaggatacagaa

SEQ ID NO: 1700 - DNA, 15 bp, synthetic construct
  source 1..15: mol_type = other DNA
cctaattctttcagc

SEQ ID NO: 1701 - DNA, 15 bp, synthetic construct
  source 1..15: mol_type = other DNA
tctgttcggagggtg

SEQ ID NO: 1702 - DNA, 15 bp, synthetic construct
  source 1..15: mol_type = other DNA
tttgttctgtgtaga

SEQ ID NO: 1703 - DNA, 15 bp, synthetic construct
  source 1..15: mol_type = other DNA
tagaggcaacacctc

SEQ ID NO: 1704 - DNA, 15 bp, synthetic construct
  source 1..15: mol_type = other DNA
tcttcaatgacttcc

SEQ ID NO: 1705 - DNA, 15 bp, synthetic construct
  source 1..15: mol_type = other DNA
tgcttgaccatgtag

SEQ ID NO: 1706 - DNA, 15 bp, synthetic construct
  source 1..15: mol_type = other DNA
cccacctagaaaact

SEQ ID NO: 1707 - DNA, 15 bp, synthetic construct
  source 1..15: mol_type = other DNA
ggtgcagactgtcca

SEQ ID NO: 1708 - DNA, 15 bp, synthetic construct
  source 1..15: mol_type = other DNA
accattcctccctaa

SEQ ID NO: 1709 - DNA, 15 bp, synthetic construct
  source 1..15: mol_type = other DNA
tcacttgagagcaca

SEQ ID NO: 1710 - DNA, 15 bp, synthetic construct
  source 1..15: mol_type = other DNA
tgggagtacgagttt

SEQ ID NO: 1711 - DNA, 15 bp, synthetic construct
  source 1..15: mol_type = other DNA
gatactggattcctc

SEQ ID NO: 1712 - DNA, 15 bp, synthetic construct
  source 1..15: mol_type = other DNA
gaggatcacccgcta

SEQ ID NO: 1713 - DNA, 15 bp, synthetic construct
  source 1..15: mol_type = other DNA
acacttctgatgagc

SEQ ID NO: 1714 - DNA, 15 bp, synthetic construct
  source 1..15: mol_type = other DNA
aaaggcgatcaaaga

SEQ ID NO: 1715 - DNA, 15 bp, synthetic construct
  source 1..15: mol_type = other DNA
gcaacacaaaacaat

SEQ ID NO: 1716 - DNA, 15 bp, synthetic construct
  source 1..15: mol_type = other DNA
gcttacatcaggttc

SEQ ID NO: 1717 - DNA, 15 bp, synthetic construct
  source 1..15: mol_type = other DNA
aattacctttaaaaa

SEQ ID NO: 1718 - DNA, 15 bp, synthetic construct
  source 1..15: mol_type = other DNA
tcctttaattaccta

SEQ ID NO: 1719 - DNA, 15 bp, synthetic construct
  source 1..15: mol_type = other DNA
ctaagaagcccttgc

SEQ ID NO: 1720 - DNA, 15 bp, synthetic construct
  source 1..15: mol_type = other DNA
gaccacacgtaggct

SEQ ID NO: 1721 - DNA, 15 bp, synthetic construct
  source 1..15: mol_type = other DNA
tcaagcattatccgg

SEQ ID NO: 1722 - DNA, 15 bp, synthetic construct
  source 1..15: mol_type = other DNA
atattcatgagctga

SEQ ID NO: 1723 - DNA, 15 bp, synthetic construct
  source 1..15: mol_type = other DNA
gacagcagatacccc

SEQ ID NO: 1724 - DNA, 15 bp, synthetic construct
  source 1..15: mol_type = other DNA
acaaatgtctatttt

SEQ ID NO: 1725 - DNA, 15 bp, synthetic construct
  source 1..15: mol_type = other DNA
aaatgcagtgctgta

SEQ ID NO: 1726 - DNA, 15 bp, synthetic construct
  source 1..15: mol_type = other DNA
aggtgattgctatgt

SEQ ID NO: 1727 - DNA, 15 bp, synthetic construct
  source 1..15: mol_type = other DNA
ctcatcttcattatt

SEQ ID NO: 1728 - DNA, 15 bp, synthetic construct
  source 1..15: mol_type = other DNA
gttaactgcagttgg

SEQ ID NO: 1729 - DNA, 15 bp, synthetic construct
  source 1..15: mol_type = other DNA
ttctcagtggcatgt

SEQ ID NO: 1730 - DNA, 15 bp, synthetic construct
  source 1..15: mol_type = other DNA
tttaggccagaggaa

SEQ ID NO: 1731 - DNA, 15 bp, synthetic construct
  source 1..15: mol_type = other DNA
acttggacccaaaag

SEQ ID NO: 1732 - DNA, 15 bp, synthetic construct
  source 1..15: mol_type = other DNA
gaccagtcaggatag

SEQ ID NO: 1733 - DNA, 15 bp, synthetic construct
  source 1..15: mol_type = other DNA
attatgggtgatcta

SEQ ID NO: 1734 - DNA, 15 bp, synthetic construct
  source 1..15: mol_type = other DNA
catagtttcttcttt

SEQ ID NO: 1735 - DNA, 15 bp, synthetic construct
  source 1..15: mol_type = other DNA
caagattgcgacaga

SEQ ID NO: 1736 - DNA, 15 bp, synthetic construct
  source 1..15: mol_type = other DNA
tgaggttcattgtca

SEQ ID NO: 1737 - DNA, 15 bp, synthetic construct
  source 1..15: mol_type = other DNA
aaccagaatgggttg

SEQ ID NO: 1738 - DNA, 15 bp, synthetic construct
  source 1..15: mol_type = other DNA
ttttgctttgttccc

SEQ ID NO: 1739 - DNA, 15 bp, synthetic construct
  source 1..15: mol_type = other DNA
agacacagaaatggg

SEQ ID NO: 1740 - DNA, 15 bp, synthetic construct
  source 1..15: mol_type = other DNA
catcaaatcaccttt

SEQ ID NO: 1741 - DNA, 15 bp, synthetic construct
  source 1..15: mol_type = other DNA
ccacatctcatgaaa

SEQ ID NO: 1742 - DNA, 15 bp, synthetic construct
  source 1..15: mol_type = other DNA
gtattcatagggaca

SEQ ID NO: 1743 - DNA, 15 bp, synthetic construct
  source 1..15: mol_type = other DNA
cccgttttacttcac

SEQ ID NO: 1744 - DNA, 15 bp, synthetic construct
  source 1..15: mol_type = other DNA
atagttaccattgcc

SEQ ID NO: 1745 - DNA, 15 bp, synthetic construct
  source 1..15: mol_type = other DNA
gctacaaactctggt

SEQ ID NO: 1746 - DNA, 15 bp, synthetic construct
  source 1..15: mol_type = other DNA
tttcttcaaatcaac

SEQ ID NO: 1747 - DNA, 15 bp, synthetic construct
  source 1..15: mol_type = other DNA
atgaataggtgatac

SEQ ID NO: 1748 - DNA, 15 bp, synthetic construct
  source 1..15: mol_type = other DNA
aaattgtgtgtaagc

SEQ ID NO: 1749 - DNA, 15 bp, synthetic construct
  source 1..15: mol_type = other DNA
gattacactatgatg

SEQ ID NO: 1750 - DNA, 15 bp, synthetic construct
  source 1..15: mol_type = other DNA
ctggttggctttatg

SEQ ID NO: 1751 - DNA, 15 bp, synthetic construct
  source 1..15: mol_type = other DNA
ttctttggagataca

SEQ ID NO: 1752 - DNA, 15 bp, synthetic construct
  source 1..15: mol_type = other DNA
tgtttagttagatgg

SEQ ID NO: 1753 - DNA, 15 bp, synthetic construct
  source 1..15: mol_type = other DNA
ctctgaagtatgttg

SEQ ID NO: 1754 - DNA, 15 bp, synthetic construct
  source 1..15: mol_type = other DNA
ggtgagacagctagt

SEQ ID NO: 1755 - DNA, 15 bp, synthetic construct
  source 1..15: mol_type = other DNA
ggttccttgcttcaa

SEQ ID NO: 1756 - DNA, 15 bp, synthetic construct
  source 1..15: mol_type = other DNA
gagcatccttgtttg

SEQ ID NO: 1757 - DNA, 15 bp, synthetic construct
  source 1..15: mol_type = other DNA
gttctactgtctcaa

SEQ ID NO: 1758 - DNA, 15 bp, synthetic construct
  source 1..15: mol_type = other DNA
tagaaaggaggaaga

SEQ ID NO: 1759 - DNA, 15 bp, synthetic construct
  source 1..15: mol_type = other DNA
aaagtatccttatcc

SEQ ID NO: 1760 - DNA, 15 bp, synthetic construct
  source 1..15: mol_type = other DNA
tcttcaccttgacag

SEQ ID NO: 1761 - DNA, 15 bp, synthetic construct
  source 1..15: mol_type = other DNA
tatgagatccagaat

SEQ ID NO: 1762 - DNA, 15 bp, synthetic construct
  source 1..15: mol_type = other DNA
cctacaacacacagc

SEQ ID NO: 1763 - DNA, 15 bp, synthetic construct
  source 1..15: mol_type = other DNA
accttgcagcctcat

SEQ ID NO: 1764 - DNA, 15 bp, synthetic construct
  source 1..15: mol_type = other DNA
taatacatatgacaa

SEQ ID NO: 1765 - DNA, 15 bp, synthetic construct
  source 1..15: mol_type = other DNA
ttcaagcaagcagaa

SEQ ID NO: 1766 - DNA, 15 bp, synthetic construct
  source 1..15: mol_type = other DNA
gctttttatctgcct

SEQ ID NO: 1767 - DNA, 15 bp, synthetic construct
  source 1..15: mol_type = other DNA
aagaaggcagttacc

SEQ ID NO: 1768 - DNA, 15 bp, synthetic construct
  source 1..15: mol_type = other DNA
acatgctggtaatga

SEQ ID NO: 1769 - DNA, 15 bp, synthetic construct
  source 1..15: mol_type = other DNA
aaaaggataaaagta

SEQ ID NO: 1770 - DNA, 15 bp, synthetic construct
  source 1..15: mol_type = other DNA
tgttttaaagttttc

SEQ ID NO: 1771 - DNA, 15 bp, synthetic construct
  source 1..15: mol_type = other DNA
tattaattgtacatg

SEQ ID NO: 1772 - DNA, 15 bp, synthetic construct
  source 1..15: mol_type = other DNA
gaatggcaaacatca

SEQ ID NO: 1773 - DNA, 15 bp, synthetic construct
  source 1..15: mol_type = other DNA
cataatttccaagtc

SEQ ID NO: 1774 - DNA, 15 bp, synthetic construct
  source 1..15: mol_type = other DNA
acttggttttaggca

SEQ ID NO: 1775 - DNA, 15 bp, synthetic construct
  source 1..15: mol_type = other DNA
acatttttcaacagg

SEQ ID NO: 1776 - DNA, 15 bp, synthetic construct
  source 1..15: mol_type = other DNA
aacgacaacgtcgct

SEQ ID NO: 1777 - DNA, 15 bp, synthetic construct
  source 1..15: mol_type = other DNA
tcaagatgaagattc

SEQ ID NO: 1778 - DNA, 15 bp, synthetic construct
  source 1..15: mol_type = other DNA
cactaaagccactaa

SEQ ID NO: 1779 - DNA, 15 bp, synthetic construct
  source 1..15: mol_type = other DNA
cagatttgtataggg

SEQ ID NO: 1780 - DNA, 15 bp, synthetic construct
  source 1..15: mol_type = other DNA
tggaagaaacaactt

SEQ ID NO: 1781 - DNA, 15 bp, synthetic construct
  source 1..15: mol_type = other DNA
tgtctctccaattcc

SEQ ID NO: 1782 - DNA, 15 bp, synthetic construct
  source 1..15: mol_type = other DNA
tgtggatgctgatag

SEQ ID NO: 1783 - DNA, 15 bp, synthetic construct
  source 1..15: mol_type = other DNA
tccttcacactcttc

SEQ ID NO: 1784 - DNA, 15 bp, synthetic construct
  source 1..15: mol_type = other DNA
tcatatcagaaaatg

SEQ ID NO: 1785 - DNA, 15 bp, synthetic construct
  source 1..15: mol_type = other DNA
actcagtgatacctg

SEQ ID NO: 1786 - DNA, 15 bp, synthetic construct
  source 1..15: mol_type = other DNA
tgccataatcactgg

SEQ ID NO: 1787 - DNA, 15 bp, synthetic construct
  source 1..15: mol_type = other DNA
atcacatctgccaag

SEQ ID NO: 1788 - DNA, 15 bp, synthetic construct
  source 1..15: mol_type = other DNA
tattttactccaaat

SEQ ID NO: 1789 - DNA, 15 bp, synthetic construct
  source 1..15: mol_type = other DNA
ttttacagaaacagt

SEQ ID NO: 1790 - DNA, 15 bp, synthetic construct
  source 1..15: mol_type = other DNA
tgttattttacagat

SEQ ID NO: 1791 - DNA, 15 bp, synthetic construct
  source 1..15: mol_type = other DNA
tcttcagcactgtat

SEQ ID NO: 1792 - DNA, 15 bp, synthetic construct
  source 1..15: mol_type = other DNA
agattcttaatgcct

SEQ ID NO: 1793 - DNA, 15 bp, synthetic construct
  source 1..15: mol_type = other DNA
aagttgtcagagtta

SEQ ID NO: 1794 - DNA, 15 bp, synthetic construct
  source 1..15: mol_type = other DNA
ttccttattcttctt

SEQ ID NO: 1795 - DNA, 15 bp, synthetic construct
  source 1..15: mol_type = other DNA
aagttgtcagagtta

SEQ ID NO: 1796 - DNA, 15 bp, synthetic construct
  source 1..15: mol_type = other DNA
ttccttattcttctt

SEQ ID NO: 1797 - DNA, 15 bp, synthetic construct
  source 1..15: mol_type = other DNA
tcccatcatcagact

SEQ ID NO: 1798 - DNA, 15 bp, synthetic construct
  source 1..15: mol_type = other DNA
tcctcccttaatgat

SEQ ID NO: 1799 - DNA, 15 bp, synthetic construct
  source 1..15: mol_type = other DNA
tcccatcatcagact

SEQ ID NO: 1800 - DNA, 15 bp, synthetic construct
  source 1..15: mol_type = other DNA
tcctcccttaatgat

SEQ ID NO: 1801 - DNA, 15 bp, synthetic construct
  source 1..15: mol_type = other DNA
taatgatgatgtgct

SEQ ID NO: 1802 - DNA, 15 bp, synthetic construct
  source 1..15: mol_type = other DNA
tagagtctgcccact

SEQ ID NO: 1803 - DNA, 15 bp, synthetic construct
  source 1..15: mol_type = other DNA
tttaagtagcaaata

SEQ ID NO: 1804 - DNA, 15 bp, synthetic construct
  source 1..15: mol_type = other DNA
cacatagcaatctac

SEQ ID NO: 1805 - DNA, 15 bp, synthetic construct
  source 1..15: mol_type = other DNA
cagaaatattcttaa

SEQ ID NO: 1806 - DNA, 15 bp, synthetic construct
  source 1..15: mol_type = other DNA
aatgtgctgcttggg

SEQ ID NO: 1807 - DNA, 15 bp, synthetic construct
  source 1..15: mol_type = other DNA
acagttccaggaaaa

SEQ ID NO: 1808 - DNA, 15 bp, synthetic construct
  source 1..15: mol_type = other DNA
tgtgggctattacct

SEQ ID NO: 1809 - DNA, 15 bp, synthetic construct
  source 1..15: mol_type = other DNA
tttgaggttatcaaa

SEQ ID NO: 1810 - DNA, 15 bp, synthetic construct
  source 1..15: mol_type = other DNA
gccaatgagtgaaaa

SEQ ID NO: 1811 - DNA, 15 bp, synthetic construct
  source 1..15: mol_type = other DNA
ctcatcttgccacaa

SEQ ID NO: 1812 - DNA, 15 bp, synthetic construct
  source 1..15: mol_type = other DNA
tctgcctgttcagca

SEQ ID NO: 1813 - DNA, 15 bp, synthetic construct
  source 1..15: mol_type = other DNA
agggagaggccctaa

SEQ ID NO: 1814 - DNA, 15 bp, synthetic construct
  source 1..15: mol_type = other DNA
actagaaagatgggt

SEQ ID NO: 1815 - DNA, 15 bp, synthetic construct
  source 1..15: mol_type = other DNA
attctccaagtcctc

SEQ ID NO: 1816 - DNA, 15 bp, synthetic construct
  source 1..15: mol_type = other DNA
agggtacaaaagaca

SEQ ID NO: 1817 - DNA, 15 bp, synthetic construct
  source 1..15: mol_type = other DNA
ttttgtaccctttac

SEQ ID NO: 1818 - DNA, 15 bp, synthetic construct
  source 1..15: mol_type = other DNA
gaagaggttcgagac

SEQ ID NO: 1819 - DNA, 15 bp, synthetic construct
  source 1..15: mol_type = other DNA
tacctgtaataaggc

SEQ ID NO: 1820 - DNA, 15 bp, synthetic construct
  source 1..15: mol_type = other DNA
gatgagggcttagca

SEQ ID NO: 1821 - DNA, 15 bp, synthetic construct
  source 1..15: mol_type = other DNA
tctccctcctcaagg

SEQ ID NO: 1822 - DNA, 15 bp, synthetic construct
  source 1..15: mol_type = other DNA
tgaccgatgtgagta

SEQ ID NO: 1823 - DNA, 15 bp, synthetic construct
  source 1..15: mol_type = other DNA
tatcctgaaaatcag

SEQ ID NO: 1824 - DNA, 15 bp, synthetic construct
  source 1..15: mol_type = other DNA
agtagcattcaaacc

SEQ ID NO: 1825 - DNA, 15 bp, synthetic construct
  source 1..15: mol_type = other DNA
tatcctgaaaatcag

SEQ ID NO: 1826 - DNA, 15 bp, synthetic construct
  source 1..15: mol_type = other DNA
agtagcattcaaacc

SEQ ID NO: 1827 - DNA, 15 bp, synthetic construct
  source 1..15: mol_type = other DNA
taacatcagccctac

SEQ ID NO: 1828 - DNA, 15 bp, synthetic construct
  source 1..15: mol_type = other DNA
agctcagtcacttta

SEQ ID NO: 1829 - DNA, 15 bp, synthetic construct
  source 1..15: mol_type = other DNA
atttgcagatgagcc

SEQ ID NO: 1830 - DNA, 15 bp, synthetic construct
  source 1..15: mol_type = other DNA
agagaccactctatg

SEQ ID NO: 1831 - DNA, 15 bp, synthetic construct
  source 1..15: mol_type = other DNA
ggtaaaatacatctg

SEQ ID NO: 1832 - DNA, 15 bp, synthetic construct
  source 1..15: mol_type = other DNA
ttctcttctagctat

SEQ ID NO: 1833 - DNA, 15 bp, synthetic construct
  source 1..15: mol_type = other DNA
tctagaggagaaaga

SEQ ID NO: 1834 - DNA, 15 bp, synthetic construct
  source 1..15: mol_type = other DNA
acatggcctcaagtc

SEQ ID NO: 1835 - DNA, 15 bp, synthetic construct
  source 1..15: mol_type = other DNA
cccattagaaatctt

SEQ ID NO: 1836 - DNA, 15 bp, synthetic construct
  source 1..15: mol_type = other DNA
tcatgtcatctcttt

SEQ ID NO: 1837 - DNA, 15 bp, synthetic construct
  source 1..15: mol_type = other DNA
acatgagggaaagaa

SEQ ID NO: 1838 - DNA, 15 bp, synthetic construct
  source 1..15: mol_type = other DNA
cttactgcgaaattc

SEQ ID NO: 1839 - DNA, 15 bp, synthetic construct
  source 1..15: mol_type = other DNA
ttgaggaactcttta

SEQ ID NO: 1840 - DNA, 15 bp, synthetic construct
  source 1..15: mol_type = other DNA
gaccttgtcaaggaa

SEQ ID NO: 1841 - DNA, 15 bp, synthetic construct
  source 1..15: mol_type = other DNA
ttgaggaactcttta

SEQ ID NO: 1842 - DNA, 15 bp, synthetic construct
  source 1..15: mol_type = other DNA
gaccttgtcaaggaa

SEQ ID NO: 1843 - DNA, 15 bp, synthetic construct
  source 1..15: mol_type = other DNA
agctacacgcttcgc

SEQ ID NO: 1844 - DNA, 15 bp, synthetic construct
  source 1..15: mol_type = other DNA
ttcacagagatgggt

SEQ ID NO: 1845 - DNA, 15 bp, synthetic construct
  source 1..15: mol_type = other DNA
tctgtgaaatctatt

SEQ ID NO: 1846 - DNA, 15 bp, synthetic construct
  source 1..15: mol_type = other DNA
gaaaaagttggcatc

SEQ ID NO: 1847 - DNA, 15 bp, synthetic construct
  source 1..15: mol_type = other DNA
tagaggcctagggag

SEQ ID NO: 1848 - DNA, 15 bp, synthetic construct
  source 1..15: mol_type = other DNA
gcatacacaggatag

SEQ ID NO: 1849 - DNA, 15 bp, synthetic construct
  source 1..15: mol_type = other DNA
ctatcctgtgtatgc

SEQ ID NO: 1850 - DNA, 15 bp, synthetic construct
  source 1..15: mol_type = other DNA
tgatacctggaaatc

SEQ ID NO: 1851 - DNA, 15 bp, synthetic construct
  source 1..15: mol_type = other DNA
gctcttacaaactct

SEQ ID NO: 1852 - DNA, 15 bp, synthetic construct
  source 1..15: mol_type = other DNA
ccataaccaggattg

SEQ ID NO: 1853 - DNA, 15 bp, synthetic construct
  source 1..15: mol_type = other DNA
gaaagtccttctcct

SEQ ID NO: 1854 - DNA, 15 bp, synthetic construct
  source 1..15: mol_type = other DNA
tgattatcttgacct

SEQ ID NO: 1855 - DNA, 15 bp, synthetic construct
  source 1..15: mol_type = other DNA
gatcctgggacggtg

SEQ ID NO: 1856 - DNA, 15 bp, synthetic construct
  source 1..15: mol_type = other DNA
tcccctagtgcactg

SEQ ID NO: 1857 - DNA, 15 bp, synthetic construct
  source 1..15: mol_type = other DNA
cctcttcgaatttac

SEQ ID NO: 1858 - DNA, 15 bp, synthetic construct
  source 1..15: mol_type = other DNA
cctttgaatttgcgt

SEQ ID NO: 1859 - DNA, 15 bp, synthetic construct
  source 1..15: mol_type = other DNA
cctcttcgaatttac

SEQ ID NO: 1860 - DNA, 15 bp, synthetic construct
  source 1..15: mol_type = other DNA
cctttgaatttgcgt

SEQ ID NO: 1861 - DNA, 15 bp, synthetic construct
  source 1..15: mol_type = other DNA
acccatacctcatcc

SEQ ID NO: 1862 - DNA, 15 bp, synthetic construct
  source 1..15: mol_type = other DNA
tatctctccacgctt

SEQ ID NO: 1863 - DNA, 15 bp, synthetic construct
  source 1..15: mol_type = other DNA
gatagtggctctggc

SEQ ID NO: 1864 - DNA, 15 bp, synthetic construct
  source 1..15: mol_type = other DNA
tattgcaggattatt

SEQ ID NO: 1865 - DNA, 15 bp, synthetic construct
  source 1..15: mol_type = other DNA
atgtatccctcagtg

SEQ ID NO: 1866 - DNA, 15 bp, synthetic construct
  source 1..15: mol_type = other DNA
ctacatctgggcaag

SEQ ID NO: 1867 - DNA, 15 bp, synthetic construct
  source 1..15: mol_type = other DNA
atgtatccctcagtg

SEQ ID NO: 1868 - DNA, 15 bp, synthetic construct
  source 1..15: mol_type = other DNA
ctacatctgggcaag

SEQ ID NO: 1869 - DNA, 15 bp, synthetic construct
  source 1..15: mol_type = other DNA
cactgttgccttcca

SEQ ID NO: 1870 - DNA, 15 bp, synthetic construct
  source 1..15: mol_type = other DNA
agttgtatgatgaca

SEQ ID NO: 1871 - DNA, 15 bp, synthetic construct
  source 1..15: mol_type = other DNA
cactgttgccttcca

SEQ ID NO: 1872 - DNA, 15 bp, synthetic construct
  source 1..15: mol_type = other DNA
agttgtatgatgaca

SEQ ID NO: 1873 - DNA, 15 bp, synthetic construct
  source 1..15: mol_type = other DNA
aggagatctggatgg

SEQ ID NO: 1874 - DNA, 15 bp, synthetic construct
  source 1..15: mol_type = other DNA
gagatgagatttcaa

SEQ ID NO: 1875 - DNA, 15 bp, synthetic construct
  source 1..15: mol_type = other DNA
ctccctctacacctc

SEQ ID NO: 1876 - DNA, 15 bp, synthetic construct
  source 1..15: mol_type = other DNA
gcaatacccaaactc

SEQ ID NO: 1877 - DNA, 15 bp, synthetic construct
  source 1..15: mol_type = other DNA
cagagttctcttatc

SEQ ID NO: 1878 - DNA, 15 bp, synthetic construct
  source 1..15: mol_type = other DNA
gttgtatcgcaggct

SEQ ID NO: 1879 - DNA, 15 bp, synthetic construct
  source 1..15: mol_type = other DNA
gttatcctctactgc

SEQ ID NO: 1880 - DNA, 15 bp, synthetic construct
  source 1..15: mol_type = other DNA
tccattcatcttcat

SEQ ID NO: 1881 - DNA, 15 bp, synthetic construct
  source 1..15: mol_type = other DNA
cacctaaatctcctt

SEQ ID NO: 1882 - DNA, 15 bp, synthetic construct
  source 1..15: mol_type = other DNA
tacctattctccatg

SEQ ID NO: 1883 - DNA, 15 bp, synthetic construct
  source 1..15: mol_type = other DNA
gtccacaacagtaaa

SEQ ID NO: 1884 - DNA, 15 bp, synthetic construct
  source 1..15: mol_type = other DNA
ttcccttgttttcgg

SEQ ID NO: 1885 - DNA, 15 bp, synthetic construct
  source 1..15: mol_type = other DNA
tgaatcttctcaaag

SEQ ID NO: 1886 - DNA, 15 bp, synthetic construct
  source 1..15: mol_type = other DNA
ctggtagaacacatc

SEQ ID NO: 1887 - DNA, 15 bp, synthetic construct
  source 1..15: mol_type = other DNA
tgaatcttctcaaag

SEQ ID NO: 1888 - DNA, 15 bp, synthetic construct
  source 1..15: mol_type = other DNA
ctggtagaacacatc

SEQ ID NO: 1889 - DNA, 15 bp, synthetic construct
  source 1..15: mol_type = other DNA
ctttcgtagagttcc

SEQ ID NO: 1890 - DNA, 15 bp, synthetic construct
  source 1..15: mol_type = other DNA
aagctacgtcgtagt

SEQ ID NO: 1891 - DNA, 15 bp, synthetic construct
  source 1..15: mol_type = other DNA
agcagttcctctcgg

SEQ ID NO: 1892 - DNA, 15 bp, synthetic construct
  source 1..15: mol_type = other DNA
attggagaagcatgg

SEQ ID NO: 1893 - DNA, 15 bp, synthetic construct
  source 1..15: mol_type = other DNA
ctcaccacatcaagt

SEQ ID NO: 1894 - DNA, 15 bp, synthetic construct
  source 1..15: mol_type = other DNA
ttctgatcctcatat

SEQ ID NO: 1895 - DNA, 15 bp, synthetic construct
  source 1..15: mol_type = other DNA
gtacccccttttctc

SEQ ID NO: 1896 - DNA, 15 bp, synthetic construct
  source 1..15: mol_type = other DNA
gttttctacatcctt

SEQ ID NO: 1897 - DNA, 15 bp, synthetic construct
  source 1..15: mol_type = other DNA
tcagcttgggagaca

SEQ ID NO: 1898 - DNA, 15 bp, synthetic construct
  source 1..15: mol_type = other DNA
cacatcatagatgta

SEQ ID NO: 1899 - DNA, 15 bp, synthetic construct
  source 1..15: mol_type = other DNA
ccggattggagtagc

SEQ ID NO: 1900 - DNA, 15 bp, synthetic construct
  source 1..15: mol_type = other DNA
ttctgctgtatcttc

SEQ ID NO: 1901 - DNA, 15 bp, synthetic construct
  source 1..15: mol_type = other DNA
ggaagatacagcaga

SEQ ID NO: 1902 - DNA, 15 bp, synthetic construct
  source 1..15: mol_type = other DNA
actactgttgcctac

SEQ ID NO: 1903 - DNA, 15 bp, synthetic construct
  source 1..15: mol_type = other DNA
ctgttccaaactcga

SEQ ID NO: 1904 - DNA, 15 bp, synthetic construct
  source 1..15: mol_type = other DNA
cttttctataattga

SEQ ID NO: 1905 - DNA, 15 bp, synthetic construct
  source 1..15: mol_type = other DNA
tctaattaatcagct

SEQ ID NO: 1906 - DNA, 15 bp, synthetic construct
  source 1..15: mol_type = other DNA
tgtaattgtgttacc

SEQ ID NO: 1907 - DNA, 15 bp, synthetic construct
  source 1..15: mol_type = other DNA
acagcaaagacaatg

SEQ ID NO: 1908 - DNA, 15 bp, synthetic construct
  source 1..15: mol_type = other DNA
tcttcttaaccctgt

SEQ ID NO: 1909 - DNA, 15 bp, synthetic construct
  source 1..15: mol_type = other DNA
acctggtgcgtctca

SEQ ID NO: 1910 - DNA, 15 bp, synthetic construct
  source 1..15: mol_type = other DNA
ataaacatcccaact

SEQ ID NO: 1911 - DNA, 15 bp, synthetic construct
  source 1..15: mol_type = other DNA
gaggacacagaattt

SEQ ID NO: 1912 - DNA, 15 bp, synthetic construct
  source 1..15: mol_type = other DNA
gaactgacagtacac

SEQ ID NO: 1913 - DNA, 15 bp, synthetic construct
  source 1..15: mol_type = other DNA
atcccttgcaacttg

SEQ ID NO: 1914 - DNA, 15 bp, synthetic construct
  source 1..15: mol_type = other DNA
gtgtagtgccaaagc

SEQ ID NO: 1915 - DNA, 15 bp, synthetic construct
  source 1..15: mol_type = other DNA
gagcttacccctagg

SEQ ID NO: 1916 - DNA, 15 bp, synthetic construct
  source 1..15: mol_type = other DNA
taccaaggtgattgt

SEQ ID NO: 1917 - DNA, 15 bp, synthetic construct
  source 1..15: mol_type = other DNA
ctcactaagccgatt

SEQ ID NO: 1918 - DNA, 15 bp, synthetic construct
  source 1..15: mol_type = other DNA
tttagtgctgtggag

SEQ ID NO: 1919 - DNA, 15 bp, synthetic construct
  source 1..15: mol_type = other DNA
gggatgaagattaaa

SEQ ID NO: 1920 - DNA, 15 bp, synthetic construct
  source 1..15: mol_type = other DNA
agtgtactatgtgtg

SEQ ID NO: 1921 - DNA, 15 bp, synthetic construct
  source 1..15: mol_type = other DNA
aaggcaggatttttt

SEQ ID NO: 1922 - DNA, 15 bp, synthetic construct
  source 1..15: mol_type = other DNA
tcagcccatttgcac

SEQ ID NO: 1923 - DNA, 15 bp, synthetic construct
  source 1..15: mol_type = other DNA
agagagtgttcgcag

SEQ ID NO: 1924 - DNA, 15 bp, synthetic construct
  source 1..15: mol_type = other DNA
gttaaccacccgtgt

SEQ ID NO: 1925 - DNA, 15 bp, synthetic construct
  source 1..15: mol_type = other DNA
taacttcctagcaca

SEQ ID NO: 1926 - DNA, 15 bp, synthetic construct
  source 1..15: mol_type = other DNA
cgggtggagtcttcg

SEQ ID NO: 1927 - DNA, 15 bp, synthetic construct
  source 1..15: mol_type = other DNA
cacaacattctttat

SEQ ID NO: 1928 - DNA, 15 bp, synthetic construct
  source 1..15: mol_type = other DNA
tgcaagaccatagta

SEQ ID NO: 1929 - DNA, 15 bp, synthetic construct
  source 1..15: mol_type = other DNA
tgcctttcatactat

SEQ ID NO: 1930 - DNA, 15 bp, synthetic construct
  source 1..15: mol_type = other DNA
cagtttttccttttt

SEQ ID NO: 1931 - DNA, 15 bp, synthetic construct
  source 1..15: mol_type = other DNA
attatccctaccacc

SEQ ID NO: 1932 - DNA, 15 bp, synthetic construct
  source 1..15: mol_type = other DNA
ctgctgtcttcctta

SEQ ID NO: 1933 - DNA, 15 bp, synthetic construct
  source 1..15: mol_type = other DNA
cagatgaccatgaac

SEQ ID NO: 1934 - DNA, 15 bp, synthetic construct
  source 1..15: mol_type = other DNA
gtggtttttaatatg

SEQ ID NO: 1935 - DNA, 15 bp, synthetic construct
  source 1..15: mol_type = other DNA
atttctcttgccttc

SEQ ID NO: 1936 - DNA, 15 bp, synthetic construct
  source 1..15: mol_type = other DNA
cacatatgccttttt

SEQ ID NO: 1937 - DNA, 15 bp, synthetic construct
  source 1..15: mol_type = other DNA
cagactacgtctttc

SEQ ID NO: 1938 - DNA, 15 bp, synthetic construct
  source 1..15: mol_type = other DNA
atgggtttgttttta

SEQ ID NO: 1939 - DNA, 15 bp, synthetic construct
  source 1..15: mol_type = other DNA
tcccccacttttctt

SEQ ID NO: 1940 - DNA, 15 bp, synthetic construct
  source 1..15: mol_type = other DNA
acgtgtgaccttgcg

SEQ ID NO: 1941 - DNA, 15 bp, synthetic construct
  source 1..15: mol_type = other DNA
cattgcattcacttg

SEQ ID NO: 1942 - DNA, 15 bp, synthetic construct
  source 1..15: mol_type = other DNA
cctagtgtgtcactg

SEQ ID NO: 1943 - DNA, 15 bp, synthetic construct
  source 1..15: mol_type = other DNA
gactctctctttaga

SEQ ID NO: 1944 - DNA, 15 bp, synthetic construct
  source 1..15: mol_type = other DNA
agtgaaaataaatga

SEQ ID NO: 1945 - DNA, 15 bp, synthetic construct
  source 1..15: mol_type = other DNA
gcaagttcgagtgtg

SEQ ID NO: 1946 - DNA, 15 bp, synthetic construct
  source 1..15: mol_type = other DNA
gaaggaactcttccg

SEQ ID NO: 1947 - DNA, 15 bp, synthetic construct
  source 1..15: mol_type = other DNA
gtggtgaacttgtcc

SEQ ID NO: 1948 - DNA, 15 bp, synthetic construct
  source 1..15: mol_type = other DNA
ggtccacttgatgat

SEQ ID NO: 1949 - DNA, 15 bp, synthetic construct
  source 1..15: mol_type = other DNA
gccctttgaagtccc

SEQ ID NO: 1950 - DNA, 15 bp, synthetic construct
  source 1..15: mol_type = other DNA
gaggagctacactat

SEQ ID NO: 1951 - DNA, 15 bp, synthetic construct
  source 1..15: mol_type = other DNA
accttcgatgcatag

SEQ ID NO: 1952 - DNA, 15 bp, synthetic construct
  source 1..15: mol_type = other DNA
tggcaagtggtatct

SEQ ID NO: 1953 - DNA, 15 bp, synthetic construct
  source 1..15: mol_type = other DNA
aaccttggacaacat

SEQ ID NO: 1954 - DNA, 15 bp, synthetic construct
  source 1..15: mol_type = other DNA
ggcacttgtagtctg

SEQ ID NO: 1955 - DNA, 15 bp, synthetic construct
  source 1..15: mol_type = other DNA
ctctttcccactaag

SEQ ID NO: 1956 - DNA, 15 bp, synthetic construct
  source 1..15: mol_type = other DNA
atgttgtgggtcaag

SEQ ID NO: 1957 - DNA, 15 bp, synthetic construct
  source 1..15: mol_type = other DNA
gttgaagagataagt

SEQ ID NO: 1958 - DNA, 15 bp, synthetic construct
  source 1..15: mol_type = other DNA
tcctgaaagcttagt

SEQ ID NO: 1959 - DNA, 15 bp, synthetic construct
  source 1..15: mol_type = other DNA
atcacacaaaccacc

SEQ ID NO: 1960 - DNA, 15 bp, synthetic construct
  source 1..15: mol_type = other DNA
tactttaggcggctt

SEQ ID NO: 1961 - DNA, 15 bp, synthetic construct
  source 1..15: mol_type = other DNA
ttttcaagatggtct

SEQ ID NO: 1962 - DNA, 15 bp, synthetic construct
  source 1..15: mol_type = other DNA
attgagtcaggaagt

SEQ ID NO: 1963 - DNA, 15 bp, synthetic construct
  source 1..15: mol_type = other DNA
aggtttggagaaaca

SEQ ID NO: 1964 - DNA, 15 bp, synthetic construct
  source 1..15: mol_type = other DNA
tatatcagcgagaca

SEQ ID NO: 1965 - DNA, 15 bp, synthetic construct
  source 1..15: mol_type = other DNA
acggcctgtccattg

SEQ ID NO: 1966 - DNA, 15 bp, synthetic construct
  source 1..15: mol_type = other DNA
acaatgagattagag

SEQ ID NO: 1967 - DNA, 15 bp, synthetic construct
  source 1..15: mol_type = other DNA
ataccacttcctcta

SEQ ID NO: 1968 - DNA, 15 bp, synthetic construct
  source 1..15: mol_type = other DNA
aatgctgctggttct

SEQ ID NO: 1969 - DNA, 15 bp, synthetic construct
  source 1..15: mol_type = other DNA
acaacgaaatttccc

SEQ ID NO: 1970 - DNA, 15 bp, synthetic construct
  source 1..15: mol_type = other DNA
cctgttttgatgtga

SEQ ID NO: 1971 - DNA, 15 bp, synthetic construct
  source 1..15: mol_type = other DNA
acttctactcctagt

SEQ ID NO: 1972 - DNA, 15 bp, synthetic construct
  source 1..15: mol_type = other DNA
cttaactttaggttg

SEQ ID NO: 1973 - DNA, 15 bp, synthetic construct
  source 1..15: mol_type = other DNA
actctgacttgtgct

SEQ ID NO: 1974 - DNA, 15 bp, synthetic construct
  source 1..15: mol_type = other DNA
tcccatttttgtttc

SEQ ID NO: 1975 - DNA, 15 bp, synthetic construct
  source 1..15: mol_type = other DNA
aatcgaggatgggaa

SEQ ID NO: 1976 - DNA, 15 bp, synthetic construct
  source 1..15: mol_type = other DNA
tccttttatcaggtt

SEQ ID NO: 1977 - DNA, 15 bp, synthetic construct
  source 1..15: mol_type = other DNA
actctgagagagatc

SEQ ID NO: 1978 - DNA, 15 bp, synthetic construct
  source 1..15: mol_type = other DNA
ttgttaccttctggt

SEQ ID NO: 1979 - DNA, 15 bp, synthetic construct
  source 1..15: mol_type = other DNA
gctgttagcctattt

SEQ ID NO: 1980 - DNA, 15 bp, synthetic construct
  source 1..15: mol_type = other DNA
acatgctgataactg

SEQ ID NO: 1981 - DNA, 15 bp, synthetic construct
  source 1..15: mol_type = other DNA
aaccttgtatctggc

SEQ ID NO: 1982 - DNA, 15 bp, synthetic construct
  source 1..15: mol_type = other DNA
ttctgagacttgcag

SEQ ID NO: 1983 - DNA, 15 bp, synthetic construct
  source 1..15: mol_type = other DNA
ccttattcttcttcc

SEQ ID NO: 1984 - DNA, 15 bp, synthetic construct
  source 1..15: mol_type = other DNA
gcctgaaataagttc

SEQ ID NO: 1985 - DNA, 15 bp, synthetic construct
  source 1..15: mol_type = other DNA
cttgttggtgaaaga

SEQ ID NO: 1986 - DNA, 15 bp, synthetic construct
  source 1..15: mol_type = other DNA
ctacctggagactca

SEQ ID NO: 1987 - DNA, 15 bp, synthetic construct
  source 1..15: mol_type = other DNA
tgtgtagacacaaag

SEQ ID NO: 1988 - DNA, 15 bp, synthetic construct
  source 1..15: mol_type = other DNA
aaaccttgaggttac

SEQ ID NO: 1989 - DNA, 15 bp, synthetic construct
  source 1..15: mol_type = other DNA
tctgtcaggaaatgt

SEQ ID NO: 1990 - DNA, 15 bp, synthetic construct
  source 1..15: mol_type = other DNA
tttctgaaacttctt

SEQ ID NO: 1991 - DNA, 15 bp, synthetic construct
  source 1..15: mol_type = other DNA
tacatgcacatccag

SEQ ID NO: 1992 - DNA, 15 bp, synthetic construct
  source 1..15: mol_type = other DNA
accatgagcctggtt

SEQ ID NO: 1993 - DNA, 15 bp, synthetic construct
  source 1..15: mol_type = other DNA
gatcaggagtttgga

SEQ ID NO: 1994 - DNA, 15 bp, synthetic construct
  source 1..15: mol_type = other DNA
tgcaggtccatagat

SEQ ID NO: 1995 - DNA, 15 bp, synthetic construct
  source 1..15: mol_type = other DNA
accttatccttcgca

SEQ ID NO: 1996 - DNA, 15 bp, synthetic construct
  source 1..15: mol_type = other DNA
cagagaatcgaggaa

SEQ ID NO: 1997 - DNA, 15 bp, synthetic construct
  source 1..15: mol_type = other DNA
tctcctgggtactcc

SEQ ID NO: 1998 - DNA, 15 bp, synthetic construct
  source 1..15: mol_type = other DNA
atgaccctgtcattc

SEQ ID NO: 1999 - DNA, 15 bp, synthetic construct
  source 1..15: mol_type = other DNA
gaatgtcgtcacagt

SEQ ID NO: 2000 - DNA, 15 bp, synthetic construct
  source 1..15: mol_type = other DNA
ttattcttacccctt

SEQ ID NO: 2001 - DNA, 15 bp, synthetic construct
  source 1..15: mol_type = other DNA
cattagccgatggtc

SEQ ID NO: 2002 - DNA, 15 bp, synthetic construct
  source 1..15: mol_type = other DNA
agtttggtcattttt

SEQ ID NO: 2003 - DNA, 15 bp, synthetic construct
  source 1..15: mol_type = other DNA
tccaagattcttgtg

SEQ ID NO: 2004 - DNA, 15 bp, synthetic construct
  source 1..15: mol_type = other DNA
agcttcttcttcaag

SEQ ID NO: 2005 - DNA, 15 bp, synthetic construct
  source 1..15: mol_type = other DNA
ggactgtcaggtaga

SEQ ID NO: 2006 - DNA, 15 bp, synthetic construct
  source 1..15: mol_type = other DNA
caaattttgaaccaa

SEQ ID NO: 2007 - DNA, 15 bp, synthetic construct
  source 1..15: mol_type = other DNA
caacattagcagcag

SEQ ID NO: 2008 - DNA, 15 bp, synthetic construct
  source 1..15: mol_type = other DNA
tgatctcttttaggg

SEQ ID NO: 2009 - DNA, 15 bp, synthetic construct
  source 1..15: mol_type = other DNA
atgccactggttacc

SEQ ID NO: 2010 - DNA, 15 bp, synthetic construct
  source 1..15: mol_type = other DNA
cctctcctaaacagg

SEQ ID NO: 2011 - DNA, 15 bp, synthetic construct
  source 1..15: mol_type = other DNA
tctttgtctagagcc

SEQ ID NO: 2012 - DNA, 15 bp, synthetic construct
  source 1..15: mol_type = other DNA
ggttatcctttctcc

SEQ ID NO: 2013 - DNA, 15 bp, synthetic construct
  source 1..15: mol_type = other DNA
ctctgtttctccaga

SEQ ID NO: 2014 - DNA, 15 bp, synthetic construct
  source 1..15: mol_type = other DNA
caggagcctgctacg

SEQ ID NO: 2015 - DNA, 15 bp, synthetic construct
  source 1..15: mol_type = other DNA
gctccatcctacggg

SEQ ID NO: 2016 - DNA, 15 bp, synthetic construct
  source 1..15: mol_type = other DNA
gcctcttctgaactg

SEQ ID NO: 2017 - DNA, 15 bp, synthetic construct
  source 1..15: mol_type = other DNA
ttcagcaatgaatgg

SEQ ID NO: 2018 - DNA, 15 bp, synthetic construct
  source 1..15: mol_type = other DNA
gttcaagaatatgct

SEQ ID NO: 2019 - DNA, 15 bp, synthetic construct
  source 1..15: mol_type = other DNA
cctcctcttaccgtc

SEQ ID NO: 2020 - DNA, 15 bp, synthetic construct
  source 1..15: mol_type = other DNA
tttcctattcccaga

SEQ ID NO: 2021 - DNA, 15 bp, synthetic construct
  source 1..15: mol_type = other DNA
agaggacctagaaac

SEQ ID NO: 2022 - DNA, 15 bp, synthetic construct
  source 1..15: mol_type = other DNA
gacagtgtagtaaga

SEQ ID NO: 2023 - DNA, 15 bp, synthetic construct
  source 1..15: mol_type = other DNA
gaaatttaagctgaa

SEQ ID NO: 2024 - DNA, 15 bp, synthetic construct
  source 1..15: mol_type = other DNA
gagatactgcatcac

SEQ ID NO: 2025 - DNA, 15 bp, synthetic construct
  source 1..15: mol_type = other DNA
actcaccgtaggttc

SEQ ID NO: 2026 - DNA, 15 bp, synthetic construct
  source 1..15: mol_type = other DNA
tacccttgtgcagat

SEQ ID NO: 2027 - DNA, 15 bp, synthetic construct
  source 1..15: mol_type = other DNA
tggtcatcttatcat

SEQ ID NO: 2028 - DNA, 15 bp, synthetic construct
  source 1..15: mol_type = other DNA
gcaaagtcacaaact

SEQ ID NO: 2029 - DNA, 15 bp, synthetic construct
  source 1..15: mol_type = other DNA
gggtagtccctcatg

SEQ ID NO: 2030 - DNA, 15 bp, synthetic construct
  source 1..15: mol_type = other DNA
gtcatctgtatcttt

SEQ ID NO: 2031 - DNA, 15 bp, synthetic construct
  source 1..15: mol_type = other DNA
acatactcatgacga

SEQ ID NO: 2032 - DNA, 15 bp, synthetic construct
  source 1..15: mol_type = other DNA
acctagactcagagg

SEQ ID NO: 2033 - DNA, 15 bp, synthetic construct
  source 1..15: mol_type = other DNA
aactcttcccaacaa

SEQ ID NO: 2034 - DNA, 15 bp, synthetic construct
  source 1..15: mol_type = other DNA
gtggacaataaatgg

SEQ ID NO: 2035 - DNA, 15 bp, synthetic construct
  source 1..15: mol_type = other DNA
acagattctccataa

SEQ ID NO: 2036 - DNA, 15 bp, synthetic construct
  source 1..15: mol_type = other DNA
cttaactcttgacca

SEQ ID NO: 2037 - DNA, 15 bp, synthetic construct
  source 1..15: mol_type = other DNA
atcagtcaccattgc

SEQ ID NO: 2038 - DNA, 15 bp, synthetic construct
  source 1..15: mol_type = other DNA
gaagaaattaattgc

SEQ ID NO: 2039 - DNA, 15 bp, synthetic construct
  source 1..15: mol_type = other DNA
cctaatgttaccaaa

SEQ ID NO: 2040 - DNA, 15 bp, synthetic construct
  source 1..15: mol_type = other DNA
tctcttaggagtgag

SEQ ID NO: 2041 - DNA, 15 bp, synthetic construct
  source 1..15: mol_type = other DNA
tccagctaggtttat

SEQ ID NO: 2042 - DNA, 15 bp, synthetic construct
  source 1..15: mol_type = other DNA
aggttgtctgttgag

SEQ ID NO: 2043 - DNA, 15 bp, synthetic construct
  source 1..15: mol_type = other DNA
atgaagacattctgg

SEQ ID NO: 2044 - DNA, 15 bp, synthetic construct
  source 1..15: mol_type = other DNA
agagagggcaatgat

SEQ ID NO: 2045 - DNA, 15 bp, synthetic construct
  source 1..15: mol_type = other DNA
gagatcctcttctgg

SEQ ID NO: 2046 - DNA, 15 bp, synthetic construct
  source 1..15: mol_type = other DNA
ggcataatttggttc

SEQ ID NO: 2047 - DNA, 15 bp, synthetic construct
  source 1..15: mol_type = other DNA
acaaagtagggttta

SEQ ID NO: 2048 - DNA, 15 bp, synthetic construct
  source 1..15: mol_type = other DNA
ccactttccattcaa

SEQ ID NO: 2049 - DNA, 15 bp, synthetic construct
  source 1..15: mol_type = other DNA
atatgttattctaat

SEQ ID NO: 2050 - DNA, 15 bp, synthetic construct
  source 1..15: mol_type = other DNA
tgccttttacccctt

SEQ ID NO: 2051 - DNA, 15 bp, synthetic construct
  source 1..15: mol_type = other DNA
accattataggtcac

SEQ ID NO: 2052 - DNA, 15 bp, synthetic construct
  source 1..15: mol_type = other DNA
acaattactgtgcaa

SEQ ID NO: 2053 - DNA, 15 bp, synthetic construct
  source 1..15: mol_type = other DNA
gttgttaacagtcaa

SEQ ID NO: 2054 - DNA, 15 bp, synthetic construct
  source 1..15: mol_type = other DNA
agaaaaggcaaaaga

SEQ ID NO: 2055 - DNA, 15 bp, synthetic construct
  source 1..15: mol_type = other DNA
tatagagcgagctgt

SEQ ID NO: 2056 - DNA, 15 bp, synthetic construct
  source 1..15: mol_type = other DNA
gatacactgcagatc

SEQ ID NO: 2057 - DNA, 15 bp, synthetic construct
  source 1..15: mol_type = other DNA
ctttctagaaggtgc

SEQ ID NO: 2058 - DNA, 15 bp, synthetic construct
  source 1..15: mol_type = other DNA
tagcatgctgaggta

SEQ ID NO: 2059 - DNA, 15 bp, synthetic construct
  source 1..15: mol_type = other DNA
ctatgcagagagtat

SEQ ID NO: 2060 - DNA, 15 bp, synthetic construct
  source 1..15: mol_type = other DNA
cattgcattttagag

SEQ ID NO: 2061 - DNA, 15 bp, synthetic construct
  source 1..15: mol_type = other DNA
acatctactttgttt

SEQ ID NO: 2062 - DNA, 15 bp, synthetic construct
  source 1..15: mol_type = other DNA
tgagatttgcggcta

SEQ ID NO: 2063 - DNA, 15 bp, synthetic construct
  source 1..15: mol_type = other DNA
aactcctataactta

SEQ ID NO: 2064 - DNA, 15 bp, synthetic construct
  source 1..15: mol_type = other DNA
cagaccaccaagaaa

SEQ ID NO: 2065 - DNA, 15 bp, synthetic construct
  source 1..15: mol_type = other DNA
accaaagcacatttc

SEQ ID NO: 2066 - DNA, 15 bp, synthetic construct
  source 1..15: mol_type = other DNA
ggtgagtgtgtactt

SEQ ID NO: 2067 - DNA, 15 bp, synthetic construct
  source 1..15: mol_type = other DNA
gggtaaataactcct

SEQ ID NO: 2068 - DNA, 15 bp, synthetic construct
  source 1..15: mol_type = other DNA
aaagattctgtcgat

SEQ ID NO: 2069 - DNA, 15 bp, synthetic construct
  source 1..15: mol_type = other DNA
ggctttgaagttata

SEQ ID NO: 2070 - DNA, 15 bp, synthetic construct
  source 1..15: mol_type = other DNA
ttactgcctttgtcg

SEQ ID NO: 2071 - DNA, 15 bp, synthetic construct
  source 1..15: mol_type = other DNA
atttcgggccttccc

SEQ ID NO: 2072 - DNA, 15 bp, synthetic construct
  source 1..15: mol_type = other DNA
ttcatctcttcataa

SEQ ID NO: 2073 - DNA, 15 bp, synthetic construct
  source 1..15: mol_type = other DNA
tcctaaaagtaactt

SEQ ID NO: 2074 - DNA, 15 bp, synthetic construct
  source 1..15: mol_type = other DNA
tcaaccccatgtcag

SEQ ID NO: 2075 - DNA, 15 bp, synthetic construct
  source 1..15: mol_type = other DNA
gcaaatgggttctag

SEQ ID NO: 2076 - DNA, 15 bp, synthetic construct
  source 1..15: mol_type = other DNA
ggcagctcggaggat

SEQ ID NO: 2077 - DNA, 15 bp, synthetic construct
  source 1..15: mol_type = other DNA
gatggagtcttctca

SEQ ID NO: 2078 - DNA, 15 bp, synthetic construct
  source 1..15: mol_type = other DNA
aatggtagaaaccga

SEQ ID NO: 2079 - DNA, 15 bp, synthetic construct
  source 1..15: mol_type = other DNA
gaaggtctacttact

SEQ ID NO: 2080 - DNA, 15 bp, synthetic construct
  source 1..15: mol_type = other DNA
ttcaaggaaaagagt

SEQ ID NO: 2081 - DNA, 15 bp, synthetic construct
  source 1..15: mol_type = other DNA
gcgcgtaccactcgc

SEQ ID NO: 2082 - DNA, 15 bp, synthetic construct
  source 1..15: mol_type = other DNA
tacaagatcctggag

SEQ ID NO: 2083 - DNA, 15 bp, synthetic construct
  source 1..15: mol_type = other DNA
gcctcgatgtagtgt

SEQ ID NO: 2084 - DNA, 15 bp, synthetic construct
  source 1..15: mol_type = other DNA
atgaaagcgtgctca

SEQ ID NO: 2085 - DNA, 15 bp, synthetic construct
  source 1..15: mol_type = other DNA
ctcgcggaagttgcc

SEQ ID NO: 2086 - DNA, 15 bp, synthetic construct
  source 1..15: mol_type = other DNA
ggaagctcccatgcg

SEQ ID NO: 2087 - DNA, 15 bp, synthetic construct
  source 1..15: mol_type = other DNA
gatatgaagaaggca

SEQ ID NO: 2088 - DNA, 15 bp, synthetic construct
  source 1..15: mol_type = other DNA
aggtaagtatacagt

SEQ ID NO: 2089 - DNA, 15 bp, synthetic construct
  source 1..15: mol_type = other DNA
accaatagatagcat

SEQ ID NO: 2090 - DNA, 15 bp, synthetic construct
  source 1..15: mol_type = other DNA
cagcattgtaacttg

SEQ ID NO: 2091 - DNA, 15 bp, synthetic construct
  source 1..15: mol_type = other DNA
gtcttataccaacta

SEQ ID NO: 2092 - DNA, 15 bp, synthetic construct
  source 1..15: mol_type = other DNA
aaaacacccatatac

SEQ ID NO: 2093 - DNA, 15 bp, synthetic construct
  source 1..15: mol_type = other DNA
atttcctcagttcaa

SEQ ID NO: 2094 - DNA, 15 bp, synthetic construct
  source 1..15: mol_type = other DNA
aattgtacttagtat

SEQ ID NO: 2095 - DNA, 15 bp, synthetic construct
  source 1..15: mol_type = other DNA
atccatgtcctccaa

SEQ ID NO: 2096 - DNA, 15 bp, synthetic construct
  source 1..15: mol_type = other DNA
tccttgtaacttggg

SEQ ID NO: 2097 - DNA, 15 bp, synthetic construct
  source 1..15: mol_type = other DNA
ttagccttagaactg

SEQ ID NO: 2098 - DNA, 15 bp, synthetic construct
  source 1..15: mol_type = other DNA
tagtaggccaaatcc

SEQ ID NO: 2099 - DNA, 15 bp, synthetic construct
  source 1..15: mol_type = other DNA
aatcaatccaaacat

SEQ ID NO: 2100 - DNA, 15 bp, synthetic construct
  source 1..15: mol_type = other DNA
tttcatccaagtctg

SEQ ID NO: 2101 - DNA, 15 bp, synthetic construct
  source 1..15: mol_type = other DNA
gactcaaaaacaacc

SEQ ID NO: 2102 - DNA, 15 bp, synthetic construct
  source 1..15: mol_type = other DNA
atcatcttccagtac

SEQ ID NO: 2103 - DNA, 15 bp, synthetic construct
  source 1..15: mol_type = other DNA
cgctcatgctgataa

SEQ ID NO: 2104 - DNA, 15 bp, synthetic construct
  source 1..15: mol_type = other DNA
tttctagcacttaat

SEQ ID NO: 2105 - DNA, 15 bp, synthetic construct
  source 1..15: mol_type = other DNA
gcagttagaaagtca

SEQ ID NO: 2106 - DNA, 15 bp, synthetic construct
  source 1..15: mol_type = other DNA
agaagggtgaaggta

SEQ ID NO: 2107 - DNA, 15 bp, synthetic construct
  source 1..15: mol_type = other DNA
gaggaagaggagatc

SEQ ID NO: 2108 - DNA, 15 bp, synthetic construct
  source 1..15: mol_type = other DNA
ataagctgccaccca

SEQ ID NO: 2109 - DNA, 15 bp, synthetic construct
  source 1..15: mol_type = other DNA
aaatttgcaactccc

SEQ ID NO: 2110 - DNA, 15 bp, synthetic construct
  source 1..15: mol_type = other DNA
gcattcggaataaaa

SEQ ID NO: 2111 - DNA, 15 bp, synthetic construct
  source 1..15: mol_type = other DNA
tagtggtattctggt

SEQ ID NO: 2112 - DNA, 15 bp, synthetic construct
  source 1..15: mol_type = other DNA
agtcctaggtgtgaa

SEQ ID NO: 2113 - DNA, 15 bp, synthetic construct
  source 1..15: mol_type = other DNA
ctgggtatcttctag

SEQ ID NO: 2114 - DNA, 15 bp, synthetic construct
  source 1..15: mol_type = other DNA
tcaacgatgatgctt

SEQ ID NO: 2115 - DNA, 15 bp, synthetic construct
  source 1..15: mol_type = other DNA
ttggctctgtccttc

SEQ ID NO: 2116 - DNA, 15 bp, synthetic construct
  source 1..15: mol_type = other DNA
acatttccagatgct

SEQ ID NO: 2117 - DNA, 15 bp, synthetic construct
  source 1..15: mol_type = other DNA
aggatggccactgtt

SEQ ID NO: 2118 - DNA, 15 bp, synthetic construct
  source 1..15: mol_type = other DNA
agaagatggagtctt

SEQ ID NO: 2119 - DNA, 15 bp, synthetic construct
  source 1..15: mol_type = other DNA
ccaaggctgagagtt

SEQ ID NO: 2120 - DNA, 15 bp, synthetic construct
  source 1..15: mol_type = other DNA
ttagtgatttcagtt

SEQ ID NO: 2121 - DNA, 15 bp, synthetic construct
  source 1..15: mol_type = other DNA
ggatgagatgtattt

SEQ ID NO: 2122 - DNA, 15 bp, synthetic construct
  source 1..15: mol_type = other DNA
ccagcttgtataccc

SEQ ID NO: 2123 - DNA, 15 bp, synthetic construct
  source 1..15: mol_type = other DNA
cagtggtaataatta

SEQ ID NO: 2124 - DNA, 15 bp, synthetic construct
  source 1..15: mol_type = other DNA
cagcatgtcttcctc

SEQ ID NO: 2125 - DNA, 15 bp, synthetic construct
  source 1..15: mol_type = other DNA
cagctccattggtta

SEQ ID NO: 2126 - DNA, 15 bp, synthetic construct
  source 1..15: mol_type = other DNA
ttgcttttgtccagt

SEQ ID NO: 2127 - DNA, 15 bp, synthetic construct
  source 1..15: mol_type = other DNA
tcatcactggacaaa

SEQ ID NO: 2128 - DNA, 15 bp, synthetic construct
  source 1..15: mol_type = other DNA
ttcctttttaaatct

SEQ ID NO: 2129 - DNA, 15 bp, synthetic construct
  source 1..15: mol_type = other DNA
ttagaaaggcctgac

SEQ ID NO: 2130 - DNA, 15 bp, synthetic construct
  source 1..15: mol_type = other DNA
cttctgccacaatat

SEQ ID NO: 2131 - DNA, 15 bp, synthetic construct
  source 1..15: mol_type = other DNA
catgctctgtcgctg

SEQ ID NO: 2132 - DNA, 15 bp, synthetic construct
  source 1..15: mol_type = other DNA
ttggtccaccttttg

SEQ ID NO: 2133 - DNA, 15 bp, synthetic construct
  source 1..15: mol_type = other DNA
aactgaagggacttt

SEQ ID NO: 2134 - DNA, 15 bp, synthetic construct
  source 1..15: mol_type = other DNA
atagtatggcttggc

SEQ ID NO: 2135 - DNA, 15 bp, synthetic construct
  source 1..15: mol_type = other DNA
taacctttgctagta

SEQ ID NO: 2136 - DNA, 15 bp, synthetic construct
  source 1..15: mol_type = other DNA
atgattctttttact

SEQ ID NO: 2137 - DNA, 15 bp, synthetic construct
  source 1..15: mol_type = other DNA
gttaaaagaaaaccc

SEQ ID NO: 2138 - DNA, 15 bp, synthetic construct
  source 1..15: mol_type = other DNA
gcacctgaggaaact

SEQ ID NO: 2139 - DNA, 15 bp, synthetic construct
  source 1..15: mol_type = other DNA
ggacctgaagtctca

SEQ ID NO: 2140 - DNA, 15 bp, synthetic construct
  source 1..15: mol_type = other DNA
ggtgatgtagtttcg

SEQ ID NO: 2141 - DNA, 15 bp, synthetic construct
  source 1..15: mol_type = other DNA
tagctgcaacctagg

SEQ ID NO: 2142 - DNA, 15 bp, synthetic construct
  source 1..15: mol_type = other DNA
ctgaggcaagaagcg

SEQ ID NO: 2143 - DNA, 15 bp, synthetic construct
  source 1..15: mol_type = other DNA
gctaatgaccctgac

SEQ ID NO: 2144 - DNA, 15 bp, synthetic construct
  source 1..15: mol_type = other DNA
gatttggccttagtg

SEQ ID NO: 2145 - DNA, 15 bp, synthetic construct
  source 1..15: mol_type = other DNA
tttccacaagtgtct

SEQ ID NO: 2146 - DNA, 15 bp, synthetic construct
  source 1..15: mol_type = other DNA
ccaatgtcccattga

SEQ ID NO: 2147 - DNA, 15 bp, synthetic construct
  source 1..15: mol_type = other DNA
aaactccctcttgtt

SEQ ID NO: 2148 - DNA, 15 bp, synthetic construct
  source 1..15: mol_type = other DNA
ggaagtgacagtgta

SEQ ID NO: 2149 - DNA, 15 bp, synthetic construct
  source 1..15: mol_type = other DNA
gtagacagtagtgag

SEQ ID NO: 2150 - DNA, 15 bp, synthetic construct
  source 1..15: mol_type = other DNA
tctgcttgtgagtct

SEQ ID NO: 2151 - DNA, 15 bp, synthetic construct
  source 1..15: mol_type = other DNA
catttgtatctaggg

SEQ ID NO: 2152 - DNA, 15 bp, synthetic construct
  source 1..15: mol_type = other DNA
ttcatgacgtcaata

SEQ ID NO: 2153 - DNA, 15 bp, synthetic construct
  source 1..15: mol_type = other DNA
aggagatgattcaga

SEQ ID NO: 2154 - DNA, 15 bp, synthetic construct
  source 1..15: mol_type = other DNA
ctgccagtctcgatg

SEQ ID NO: 2155 - DNA, 15 bp, synthetic construct
  source 1..15: mol_type = other DNA
cagcccacaataact

SEQ ID NO: 2156 - DNA, 15 bp, synthetic construct
  source 1..15: mol_type = other DNA
gacgatggcgaagtt

SEQ ID NO: 2157 - DNA, 15 bp, synthetic construct
  source 1..15: mol_type = other DNA
actctgccctagatt

SEQ ID NO: 2158 - DNA, 15 bp, synthetic construct
  source 1..15: mol_type = other DNA
tcagatcaggtcatg

SEQ ID NO: 2159 - DNA, 15 bp, synthetic construct
  source 1..15: mol_type = other DNA
ggccctatgaggact

SEQ ID NO: 2160 - DNA, 15 bp, synthetic construct
  source 1..15: mol_type = other DNA
agtcagacttgaaga

SEQ ID NO: 2161 - DNA, 15 bp, synthetic construct
  source 1..15: mol_type = other DNA
tccaggtgaacatgg

SEQ ID NO: 2162 - DNA, 15 bp, synthetic construct
  source 1..15: mol_type = other DNA
tacacaatgagggtt

SEQ ID NO: 2163 - DNA, 15 bp, synthetic construct
  source 1..15: mol_type = other DNA
cacctggctacacct

SEQ ID NO: 2164 - DNA, 15 bp, synthetic construct
  source 1..15: mol_type = other DNA
ttgcagggtgaccgt

SEQ ID NO: 2165 - DNA, 15 bp, synthetic construct
  source 1..15: mol_type = other DNA
atcccctttcttacc

SEQ ID NO: 2166 - DNA, 15 bp, synthetic construct
  source 1..15: mol_type = other DNA
aagtatctggttgga

SEQ ID NO: 2167 - DNA, 15 bp, synthetic construct
  source 1..15: mol_type = other DNA
atcactcccatgagg

SEQ ID NO: 2168 - DNA, 15 bp, synthetic construct
  source 1..15: mol_type = other DNA
atctgttcctcagtg

SEQ ID NO: 2169 - DNA, 15 bp, synthetic construct
  source 1..15: mol_type = other DNA
cggaatgtaggataa

SEQ ID NO: 2170 - DNA, 15 bp, synthetic construct
  source 1..15: mol_type = other DNA
aactagaggacctac

SEQ ID NO: 2171 - DNA, 15 bp, synthetic construct
  source 1..15: mol_type = other DNA
actcccgtggtaagc

SEQ ID NO: 2172 - DNA, 15 bp, synthetic construct
  source 1..15: mol_type = other DNA
gtgaagaggttactg

SEQ ID NO: 2173 - DNA, 15 bp, synthetic construct
  source 1..15: mol_type = other DNA
cacattcctaacact

SEQ ID NO: 2174 - DNA, 15 bp, synthetic construct
  source 1..15: mol_type = other DNA
gccgagggtaggttc

SEQ ID NO: 2175 - DNA, 15 bp, synthetic construct
  source 1..15: mol_type = other DNA
ggcactgcgcctaag

SEQ ID NO: 2176 - DNA, 15 bp, synthetic construct
  source 1..15: mol_type = other DNA
tcctccacgaccact

SEQ ID NO: 2177 - DNA, 15 bp, synthetic construct
  source 1..15: mol_type = other DNA
ggagcccgaggatct

SEQ ID NO: 2178 - DNA, 15 bp, synthetic construct
  source 1..15: mol_type = other DNA
cctcgtcgtctatac

SEQ ID NO: 2179 - DNA, 15 bp, synthetic construct
  source 1..15: mol_type = other DNA
ctccgactctcacta

SEQ ID NO: 2180 - DNA, 15 bp, synthetic construct
  source 1..15: mol_type = other DNA
cgttttctccgtcag

SEQ ID NO: 2181 - DNA, 15 bp, synthetic construct
  source 1..15: mol_type = other DNA
ggttaaggaactgct

SEQ ID NO: 2182 - DNA, 15 bp, synthetic construct
  source 1..15: mol_type = other DNA
tatctgttgccatac

SEQ ID NO: 2183 - DNA, 15 bp, synthetic construct
  source 1..15: mol_type = other DNA
attttcagattgttc

SEQ ID NO: 2184 - DNA, 15 bp, synthetic construct
  source 1..15: mol_type = other DNA
ttcttgtgctgctta

SEQ ID NO: 2185 - DNA, 15 bp, synthetic construct
  source 1..15: mol_type = other DNA
gctttacattttcta

SEQ ID NO: 2186 - DNA, 15 bp, synthetic construct
  source 1..15: mol_type = other DNA
cacttcagtatcttc

SEQ ID NO: 2187 - DNA, 15 bp, synthetic construct
  source 1..15: mol_type = other DNA
gactcttcccaaacc

SEQ ID NO: 2188 - DNA, 15 bp, synthetic construct
  source 1..15: mol_type = other DNA
ttaactcaaaaaggg

SEQ ID NO: 2189 - DNA, 15 bp, synthetic construct
  source 1..15: mol_type = other DNA
attacccagcattta

SEQ ID NO: 2190 - DNA, 15 bp, synthetic construct
  source 1..15: mol_type = other DNA
cctgaagtcactaat

SEQ ID NO: 2191 - DNA, 15 bp, synthetic construct
  source 1..15: mol_type = other DNA
tttttcaatacactt

SEQ ID NO: 2192 - DNA, 15 bp, synthetic construct
  source 1..15: mol_type = other DNA
cgggtgctgagatac

SEQ ID NO: 2193 - DNA, 15 bp, synthetic construct
  source 1..15: mol_type = other DNA
agcttcagacttagc

SEQ ID NO: 2194 - DNA, 15 bp, synthetic construct
  source 1..15: mol_type = other DNA
cttgatctttatcag

SEQ ID NO: 2195 - DNA, 15 bp, synthetic construct
  source 1..15: mol_type = other DNA
agtggcctgaaaaca

SEQ ID NO: 2196 - DNA, 15 bp, synthetic construct
  source 1..15: mol_type = other DNA
tgttacttcccttgg

SEQ ID NO: 2197 - DNA, 15 bp, synthetic construct
  source 1..15: mol_type = other DNA
cctagttttactata

SEQ ID NO: 2198 - DNA, 15 bp, synthetic construct
  source 1..15: mol_type = other DNA
ccaggaaacagtaaa

SEQ ID NO: 2199 - DNA, 15 bp, synthetic construct
  source 1..15: mol_type = other DNA
ccttcatttgttcca

SEQ ID NO: 2200 - DNA, 15 bp, synthetic construct
  source 1..15: mol_type = other DNA
acatctaatctgaag

SEQ ID NO: 2201 - DNA, 15 bp, synthetic construct
  source 1..15: mol_type = other DNA
tttaaaggctcaaag

SEQ ID NO: 2202 - DNA, 15 bp, synthetic construct
  source 1..15: mol_type = other DNA
tagtagtttctagag

SEQ ID NO: 2203 - DNA, 15 bp, synthetic construct
  source 1..15: mol_type = other DNA
gcatagctaaagtta

SEQ ID NO: 2204 - DNA, 15 bp, synthetic construct
  source 1..15: mol_type = other DNA
ggtgttgcagtcttc

SEQ ID NO: 2205 - DNA, 15 bp, synthetic construct
  source 1..15: mol_type = other DNA
ctctcaaccaaaaga

SEQ ID NO: 2206 - DNA, 15 bp, synthetic construct
  source 1..15: mol_type = other DNA
aggttagagttgaca

SEQ ID NO: 2207 - DNA, 15 bp, synthetic construct
  source 1..15: mol_type = other DNA
cccactcacataggg

SEQ ID NO: 2208 - DNA, 15 bp, synthetic construct
  source 1..15: mol_type = other DNA
tccaaaggctcttcg

SEQ ID NO: 2209 - DNA, 15 bp, synthetic construct
  source 1..15: mol_type = other DNA
gagaagcctggtact

SEQ ID NO: 2210 - DNA, 15 bp, synthetic construct
  source 1..15: mol_type = other DNA
agagcctgatcagtt

SEQ ID NO: 2211 - DNA, 15 bp, synthetic construct
  source 1..15: mol_type = other DNA
tatcgacagaccttg

SEQ ID NO: 2212 - DNA, 15 bp, synthetic construct
  source 1..15: mol_type = other DNA
actagactgtactgc

SEQ ID NO: 2213 - DNA, 15 bp, synthetic construct
  source 1..15: mol_type = other DNA
aagtttcagccactc

SEQ ID NO: 2214 - DNA, 15 bp, synthetic construct
  source 1..15: mol_type = other DNA
aaaacaaggagcttc

SEQ ID NO: 2215 - DNA, 15 bp, synthetic construct
  source 1..15: mol_type = other DNA
ccctctagtgcatac

SEQ ID NO: 2216 - DNA, 15 bp, synthetic construct
  source 1..15: mol_type = other DNA
caggaacaattgata

SEQ ID NO: 2217 - DNA, 15 bp, synthetic construct
  source 1..15: mol_type = other DNA
ttacccaatagtcat

SEQ ID NO: 2218 - DNA, 15 bp, synthetic construct
  source 1..15: mol_type = other DNA
tcgctatgtgagtga

SEQ ID NO: 2219 - DNA, 15 bp, synthetic construct
  source 1..15: mol_type = other DNA
agctgtttctgtatt

SEQ ID NO: 2220 - DNA, 15 bp, synthetic construct
  source 1..15: mol_type = other DNA
gccactcctgttgat

SEQ ID NO: 2221 - DNA, 15 bp, synthetic construct
  source 1..15: mol_type = other DNA
tattcctggactgac

SEQ ID NO: 2222 - DNA, 15 bp, synthetic construct
  source 1..15: mol_type = other DNA
actgtctgataacac

SEQ ID NO: 2223 - DNA, 15 bp, synthetic construct
  source 1..15: mol_type = other DNA
cttacccacagaggg

SEQ ID NO: 2224 - DNA, 15 bp, synthetic construct
  source 1..15: mol_type = other DNA
cctctttaggcagat

SEQ ID NO: 2225 - DNA, 15 bp, synthetic construct
  source 1..15: mol_type = other DNA
accgtctactttcta

SEQ ID NO: 2226 - DNA, 15 bp, synthetic construct
  source 1..15: mol_type = other DNA
cttcaggtatatgag

SEQ ID NO: 2227 - DNA, 15 bp, synthetic construct
  source 1..15: mol_type = other DNA
cacaacatagagaaa

SEQ ID NO: 2228 - DNA, 15 bp, synthetic construct
  source 1..15: mol_type = other DNA
ggtgaaactttctgt

SEQ ID NO: 2229 - DNA, 15 bp, synthetic construct
  source 1..15: mol_type = other DNA
gaccttgccaggtag

SEQ ID NO: 2230 - DNA, 15 bp, synthetic construct
  source 1..15: mol_type = other DNA
agtagaggttacagc

SEQ ID NO: 2231 - DNA, 15 bp, synthetic construct
  source 1..15: mol_type = other DNA
gtcttgccagataat

SEQ ID NO: 2232 - DNA, 15 bp, synthetic construct
  source 1..15: mol_type = other DNA
aagtagagggtaaaa

SEQ ID NO: 2233 - DNA, 15 bp, synthetic construct
  source 1..15: mol_type = other DNA
atgtttcagcggttc

SEQ ID NO: 2234 - DNA, 15 bp, synthetic construct
  source 1..15: mol_type = other DNA
tacctggcaacgact

SEQ ID NO: 2235 - DNA, 15 bp, synthetic construct
  source 1..15: mol_type = other DNA
aacctctacttctta

SEQ ID NO: 2236 - DNA, 15 bp, synthetic construct
  source 1..15: mol_type = other DNA
aggtagatgactatg

SEQ ID NO: 2237 - DNA, 15 bp, synthetic construct
  source 1..15: mol_type = other DNA
gggataccaacttta

SEQ ID NO: 2238 - DNA, 15 bp, synthetic construct
  source 1..15: mol_type = other DNA
tgaaactttcagaga

SEQ ID NO: 2239 - DNA, 15 bp, synthetic construct
  source 1..15: mol_type = other DNA
aggcctttccagagg

SEQ ID NO: 2240 - DNA, 15 bp, synthetic construct
  source 1..15: mol_type = other DNA
aagtagaggttatgg

SEQ ID NO: 2241 - DNA, 15 bp, synthetic construct
  source 1..15: mol_type = other DNA
accaactggcattgc

SEQ ID NO: 2242 - DNA, 15 bp, synthetic construct
  source 1..15: mol_type = other DNA
tggaacctaaaggtc

SEQ ID NO: 2243 - DNA, 15 bp, synthetic construct
  source 1..15: mol_type = other DNA
tctggacctactgaa

SEQ ID NO: 2244 - DNA, 15 bp, synthetic construct
  source 1..15: mol_type = other DNA
taaatgactgtctga

SEQ ID NO: 2245 - DNA, 15 bp, synthetic construct
  source 1..15: mol_type = other DNA
accagcagaccctat

SEQ ID NO: 2246 - DNA, 15 bp, synthetic construct
  source 1..15: mol_type = other DNA
agtagataacccagt

SEQ ID NO: 2247 - DNA, 15 bp, synthetic construct
  source 1..15: mol_type = other DNA
cagctgttcctcaac

SEQ ID NO: 2248 - DNA, 15 bp, synthetic construct
  source 1..15: mol_type = other DNA
aaaatgcggcaactc

SEQ ID NO: 2249 - DNA, 15 bp, synthetic construct
  source 1..15: mol_type = other DNA
cttcctactcacaca

SEQ ID NO: 2250 - DNA, 15 bp, synthetic construct
  source 1..15: mol_type = other DNA
tcccagtcttctggt

SEQ ID NO: 2251 - DNA, 15 bp, synthetic construct
  source 1..15: mol_type = other DNA
gtaactttgaaagca

SEQ ID NO: 2252 - DNA, 15 bp, synthetic construct
  source 1..15: mol_type = other DNA
tcctgttgagagata

SEQ ID NO: 2253 - DNA, 15 bp, synthetic construct
  source 1..15: mol_type = other DNA
actactcacgtagag

SEQ ID NO: 2254 - DNA, 15 bp, synthetic construct
  source 1..15: mol_type = other DNA
ctatttgtgagtagg

SEQ ID NO: 2255 - DNA, 15 bp, synthetic construct
  source 1..15: mol_type = other DNA
tttccagcagctacc

SEQ ID NO: 2256 - DNA, 15 bp, synthetic construct
  source 1..15: mol_type = other DNA
gatactggttttcca

SEQ ID NO: 2257 - DNA, 15 bp, synthetic construct
  source 1..15: mol_type = other DNA
agctgtccctgaact

SEQ ID NO: 2258 - DNA, 15 bp, synthetic construct
  source 1..15: mol_type = other DNA
tatctggcaaatcct

SEQ ID NO: 2259 - DNA, 15 bp, synthetic construct
  source 1..15: mol_type = other DNA
atcgagagaaaccag

SEQ ID NO: 2260 - DNA, 15 bp, synthetic construct
  source 1..15: mol_type = other DNA
atcagcctgagaatt

SEQ ID NO: 2261 - DNA, 15 bp, synthetic construct
  source 1..15: mol_type = other DNA
agctcaaataatgtg

SEQ ID NO: 2262 - DNA, 15 bp, synthetic construct
  source 1..15: mol_type = other DNA
accttcttagattgt

SEQ ID NO: 2263 - DNA, 15 bp, synthetic construct
  source 1..15: mol_type = other DNA
caattttcctgctcc

SEQ ID NO: 2264 - DNA, 15 bp, synthetic construct
  source 1..15: mol_type = other DNA
ttctaactgtagttg

SEQ ID NO: 2265 - DNA, 15 bp, synthetic construct
  source 1..15: mol_type = other DNA
aaattgggagtttat

SEQ ID NO: 2266 - DNA, 15 bp, synthetic construct
  source 1..15: mol_type = other DNA
attactgtcccacga

SEQ ID NO: 2267 - DNA, 15 bp, synthetic construct
  source 1..15: mol_type = other DNA
gtagtgatgccagtg

SEQ ID NO: 2268 - DNA, 15 bp, synthetic construct
  source 1..15: mol_type = other DNA
ttcagtgaggattca

SEQ ID NO: 2269 - DNA, 15 bp, synthetic construct
  source 1..15: mol_type = other DNA
acagatagcagggag

SEQ ID NO: 2270 - DNA, 15 bp, synthetic construct
  source 1..15: mol_type = other DNA
cttcctcaaaacata

SEQ ID NO: 2271 - DNA, 15 bp, synthetic construct
  source 1..15: mol_type = other DNA
ttgcaattgttgaca

SEQ ID NO: 2272 - DNA, 15 bp, synthetic construct
  source 1..15: mol_type = other DNA
ccatcacccattctt

SEQ ID NO: 2273 - DNA, 15 bp, synthetic construct
  source 1..15: mol_type = other DNA
ggtctaatcttagcg

SEQ ID NO: 2274 - DNA, 15 bp, synthetic construct
  source 1..15: mol_type = other DNA
acaagggtgtctatc

SEQ ID NO: 2275 - DNA, 15 bp, synthetic construct
  source 1..15: mol_type = other DNA
tgaaaagggatgttt

SEQ ID NO: 2276 - DNA, 15 bp, synthetic construct
  source 1..15: mol_type = other DNA
ctttgctgattttga

SEQ ID NO: 2277 - DNA, 15 bp, synthetic construct
  source 1..15: mol_type = other DNA
cattccccatttcag

SEQ ID NO: 2278 - DNA, 15 bp, synthetic construct
  source 1..15: mol_type = other DNA
accttaacaacagag

SEQ ID NO: 2279 - DNA, 15 bp, synthetic construct
  source 1..15: mol_type = other DNA
ctcaccgacattcta

SEQ ID NO: 2280 - DNA, 15 bp, synthetic construct
  source 1..15: mol_type = other DNA
aaaatcaacaggtaa

SEQ ID NO: 2281 - DNA, 15 bp, synthetic construct
  source 1..15: mol_type = other DNA
cagaaggtagaaggc

SEQ ID NO: 2282 - DNA, 15 bp, synthetic construct
  source 1..15: mol_type = other DNA
ctagtctggaactcg

SEQ ID NO: 2283 - DNA, 15 bp, synthetic construct
  source 1..15: mol_type = other DNA
tagcatgggcagacc

SEQ ID NO: 2284 - DNA, 15 bp, synthetic construct
  source 1..15: mol_type = other DNA
ggtctggagctacat

SEQ ID NO: 2285 - DNA, 15 bp, synthetic construct
  source 1..15: mol_type = other DNA
tgaggaaacaccatt

SEQ ID NO: 2286 - DNA, 15 bp, synthetic construct
  source 1..15: mol_type = other DNA
ttcatttggtcatct

SEQ ID NO: 2287 - DNA, 15 bp, synthetic construct
  source 1..15: mol_type = other DNA
aatgccaaagcaaag

SEQ ID NO: 2288 - DNA, 15 bp, synthetic construct
  source 1..15: mol_type = other DNA
agagttatatgaaca

SEQ ID NO: 2289 - DNA, 15 bp, synthetic construct
  source 1..15: mol_type = other DNA
cctccttcaaataga

SEQ ID NO: 2290 - DNA, 15 bp, synthetic construct
  source 1..15: mol_type = other DNA
aggtcctagaaaacc

SEQ ID NO: 2291 - DNA, 15 bp, synthetic construct
  source 1..15: mol_type = other DNA
agtaaacctgtagca

SEQ ID NO: 2292 - DNA, 15 bp, synthetic construct
  source 1..15: mol_type = other DNA
gttatcacaatgaga

SEQ ID NO: 2293 - DNA, 15 bp, synthetic construct
  source 1..15: mol_type = other DNA
atctgctgtattctt

SEQ ID NO: 2294 - DNA, 15 bp, synthetic construct
  source 1..15: mol_type = other DNA
taacctgttggactg

SEQ ID NO: 2295 - DNA, 15 bp, synthetic construct
  source 1..15: mol_type = other DNA
tgaaattatagagcc

SEQ ID NO: 2296 - DNA, 15 bp, synthetic construct
  source 1..15: mol_type = other DNA
gcaaataaaagacag

SEQ ID NO: 2297 - DNA, 15 bp, synthetic construct
  source 1..15: mol_type = other DNA
gatacatttctcttt

SEQ ID NO: 2298 - DNA, 15 bp, synthetic construct
  source 1..15: mol_type = other DNA
gggagctttcaacgg

SEQ ID NO: 2299 - DNA, 15 bp, synthetic construct
  source 1..15: mol_type = other DNA
gcctttattattgcc

SEQ ID NO: 2300 - DNA, 15 bp, synthetic construct
  source 1..15: mol_type = other DNA
taaagagcactggac

SEQ ID NO: 2301 - DNA, 15 bp, synthetic construct
  source 1..15: mol_type = other DNA
aatctcatgtcgcta

SEQ ID NO: 2302 - DNA, 15 bp, synthetic construct
  source 1..15: mol_type = other DNA
atacaaagccaatcc

SEQ ID NO: 2303 - DNA, 15 bp, synthetic construct
  source 1..15: mol_type = other DNA
tctgttgtgtttatt

SEQ ID NO: 2304 - DNA, 15 bp, synthetic construct
  source 1..15: mol_type = other DNA
tttagaagaccagaa

SEQ ID NO: 2305 - DNA, 15 bp, synthetic construct
  source 1..15: mol_type = other DNA
gtgttaatttccctt

SEQ ID NO: 2306 - DNA, 15 bp, synthetic construct
  source 1..15: mol_type = other DNA
cactgaccctcacat

SEQ ID NO: 2307 - DNA, 15 bp, synthetic construct
  source 1..15: mol_type = other DNA
atcagtcttttgtgc

SEQ ID NO: 2308 - DNA, 15 bp, synthetic construct
  source 1..15: mol_type = other DNA
tgatcacttggtagg

SEQ ID NO: 2309 - DNA, 15 bp, synthetic construct
  source 1..15: mol_type = other DNA
tcagcaaagttttac

SEQ ID NO: 2310 - DNA, 15 bp, synthetic construct
  source 1..15: mol_type = other DNA
acttctttgtttccc

SEQ ID NO: 2311 - DNA, 15 bp, synthetic construct
  source 1..15: mol_type = other DNA
aagagcctcagcatc

SEQ ID NO: 2312 - DNA, 15 bp, synthetic construct
  source 1..15: mol_type = other DNA
atcaagtcggtccac

SEQ ID NO: 2313 - DNA, 15 bp, synthetic construct
  source 1..15: mol_type = other DNA
agtttgaatgaactg

SEQ ID NO: 2314 - DNA, 15 bp, synthetic construct
  source 1..15: mol_type = other DNA
cttttaaaccgcttc

SEQ ID NO: 2315 - DNA, 15 bp, synthetic construct
  source 1..15: mol_type = other DNA
tggtagacaacagca

SEQ ID NO: 2316 - DNA, 15 bp, synthetic construct
  source 1..15: mol_type = other DNA
tagtatctgtgagca

SEQ ID NO: 2317 - DNA, 15 bp, synthetic construct
  source 1..15: mol_type = other DNA
tcttcggattgtcgg

SEQ ID NO: 2318 - DNA, 15 bp, synthetic construct
  source 1..15: mol_type = other DNA
atctcctctgttggt

SEQ ID NO: 2319 - DNA, 15 bp, synthetic construct
  source 1..15: mol_type = other DNA
tctgtttccactatt

SEQ ID NO: 2320 - DNA, 15 bp, synthetic construct
  source 1..15: mol_type = other DNA
atgaagagggcagtc

SEQ ID NO: 2321 - DNA, 15 bp, synthetic construct
  source 1..15: mol_type = other DNA
attctccctatcaca

SEQ ID NO: 2322 - DNA, 15 bp, synthetic construct
  source 1..15: mol_type = other DNA
caaaaagtagagttt

SEQ ID NO: 2323 - DNA, 15 bp, synthetic construct
  source 1..15: mol_type = other DNA
tctaggtagcaaacc

SEQ ID NO: 2324 - DNA, 15 bp, synthetic construct
  source 1..15: mol_type = other DNA
ggttgagtatcttac

SEQ ID NO: 2325 - DNA, 15 bp, synthetic construct
  source 1..15: mol_type = other DNA
gggttcacgtactca

SEQ ID NO: 2326 - DNA, 15 bp, synthetic construct
  source 1..15: mol_type = other DNA
agtcacatcactgtt

SEQ ID NO: 2327 - DNA, 15 bp, synthetic construct
  source 1..15: mol_type = other DNA
tcgagatgttgggat

SEQ ID NO: 2328 - DNA, 15 bp, synthetic construct
  source 1..15: mol_type = other DNA
atagagtcacttgga

SEQ ID NO: 2329 - DNA, 15 bp, synthetic construct
  source 1..15: mol_type = other DNA
attatatgcatatcc

SEQ ID NO: 2330 - DNA, 15 bp, synthetic construct
  source 1..15: mol_type = other DNA
tggttattggttcaa

SEQ ID NO: 2331 - DNA, 15 bp, synthetic construct
  source 1..15: mol_type = other DNA
aaagaaggaaaacgt

SEQ ID NO: 2332 - DNA, 15 bp, synthetic construct
  source 1..15: mol_type = other DNA
cctacacgtagcatt

SEQ ID NO: 2333 - DNA, 15 bp, synthetic construct
  source 1..15: mol_type = other DNA
gcatttgaatcagac

SEQ ID NO: 2334 - DNA, 15 bp, synthetic construct
  source 1..15: mol_type = other DNA
tcaatgttgaatagt

SEQ ID NO: 2335 - DNA, 15 bp, synthetic construct
  source 1..15: mol_type = other DNA
atgttacagaccgag

SEQ ID NO: 2336 - DNA, 15 bp, synthetic construct
  source 1..15: mol_type = other DNA
caagcaaaaggtcac

SEQ ID NO: 2337 - DNA, 15 bp, synthetic construct
  source 1..15: mol_type = other DNA
ttacactggcttgcc

SEQ ID NO: 2338 - DNA, 15 bp, synthetic construct
  source 1..15: mol_type = other DNA
cctggtttacacttg

SEQ ID NO: 2339 - DNA, 15 bp, synthetic construct
  source 1..15: mol_type = other DNA
tgatgagaggagatc

SEQ ID NO: 2340 - DNA, 15 bp, synthetic construct
  source 1..15: mol_type = other DNA
tccatttctctttcc

SEQ ID NO: 2341 - DNA, 15 bp, synthetic construct
  source 1..15: mol_type = other DNA
tttctgaagcagagt

SEQ ID NO: 2342 - DNA, 15 bp, synthetic construct
  source 1..15: mol_type = other DNA
agtaaggattctgct

SEQ ID NO: 2343 - DNA, 15 bp, synthetic construct
  source 1..15: mol_type = other DNA
attagggttgctagc

SEQ ID NO: 2344 - DNA, 15 bp, synthetic construct
  source 1..15: mol_type = other DNA
cacaaaacaattttt

SEQ ID NO: 2345 - DNA, 15 bp, synthetic construct
  source 1..15: mol_type = other DNA
tttggcttcctcatc

SEQ ID NO: 2346 - DNA, 15 bp, synthetic construct
  source 1..15: mol_type = other DNA
tcattttgttagagt

SEQ ID NO: 2347 - DNA, 15 bp, synthetic construct
  source 1..15: mol_type = other DNA
tattaagaagaacta

SEQ ID NO: 2348 - DNA, 15 bp, synthetic construct
  source 1..15: mol_type = other DNA
actgtactgtctctg

SEQ ID NO: 2349 - DNA, 15 bp, synthetic construct
  source 1..15: mol_type = other DNA
ctgctgtgctagtaa

SEQ ID NO: 2350 - DNA, 15 bp, synthetic construct
  source 1..15: mol_type = other DNA
ttttcgcctccatgc

SEQ ID NO: 2351 - DNA, 15 bp, synthetic construct
  source 1..15: mol_type = other DNA
gagtactgcaagtac

SEQ ID NO: 2352 - DNA, 15 bp, synthetic construct
  source 1..15: mol_type = other DNA
aaaggtgtatcttta

SEQ ID NO: 2353 - DNA, 15 bp, synthetic construct
  source 1..15: mol_type = other DNA
tcgtccattcatcca

SEQ ID NO: 2354 - DNA, 15 bp, synthetic construct
  source 1..15: mol_type = other DNA
taaagaagagccgaa

SEQ ID NO: 2355 - DNA, 15 bp, synthetic construct
  source 1..15: mol_type = other DNA
agaagaagatttgct

SEQ ID NO: 2356 - DNA, 15 bp, synthetic construct
  source 1..15: mol_type = other DNA
cttacagactgtgat

SEQ ID NO: 2357 - DNA, 15 bp, synthetic construct
  source 1..15: mol_type = other DNA
tgccatccatagtcc

SEQ ID NO: 2358 - DNA, 15 bp, synthetic construct
  source 1..15: mol_type = other DNA
cagttaaaatacgca

SEQ ID NO: 2359 - DNA, 15 bp, synthetic construct
  source 1..15: mol_type = other DNA
gaacttgtctggtca

SEQ ID NO: 2360 - DNA, 15 bp, synthetic construct
  source 1..15: mol_type = other DNA
tacagttgaagcttt

SEQ ID NO: 2361 - DNA, 15 bp, synthetic construct
  source 1..15: mol_type = other DNA
gagaacttttcaaaa

SEQ ID NO: 2362 - DNA, 15 bp, synthetic construct
  source 1..15: mol_type = other DNA
cttagccaagcttga

SEQ ID NO: 2363 - DNA, 15 bp, synthetic construct
  source 1..15: mol_type = other DNA
ggcattgaaatatct

SEQ ID NO: 2364 - DNA, 15 bp, synthetic construct
  source 1..15: mol_type = other DNA
tgttgtcttactttc

SEQ ID NO: 2365 - DNA, 15 bp, synthetic construct
  source 1..15: mol_type = other DNA
tacagtaagaaggat

SEQ ID NO: 2366 - DNA, 15 bp, synthetic construct
  source 1..15: mol_type = other DNA
aaactgttgcaaacc

SEQ ID NO: 2367 - DNA, 15 bp, synthetic construct
  source 1..15: mol_type = other DNA
ttgattcagatggtt

SEQ ID NO: 2368 - DNA, 15 bp, synthetic construct
  source 1..15: mol_type = other DNA
tcagttcagctttgt

SEQ ID NO: 2369 - DNA, 15 bp, synthetic construct
  source 1..15: mol_type = other DNA
tcactgagaactttg

SEQ ID NO: 2370 - DNA, 15 bp, synthetic construct
  source 1..15: mol_type = other DNA
atccgcaaaaaggat

SEQ ID NO: 2371 - DNA, 15 bp, synthetic construct
  source 1..15: mol_type = other DNA
gcgcacaataaacgt

SEQ ID NO: 2372 - DNA, 15 bp, synthetic construct
  source 1..15: mol_type = other DNA
cctatttttgattac

SEQ ID NO: 2373 - DNA, 15 bp, synthetic construct
  source 1..15: mol_type = other DNA
ctttggagcttgtat

SEQ ID NO: 2374 - DNA, 15 bp, synthetic construct
  source 1..15: mol_type = other DNA
actcctgtcttggta

SEQ ID NO: 2375 - DNA, 15 bp, synthetic construct
  source 1..15: mol_type = other DNA
gcaagattgaaagtg

SEQ ID NO: 2376 - DNA, 15 bp, synthetic construct
  source 1..15: mol_type = other DNA
catttgtttaactta

SEQ ID NO: 2377 - DNA, 15 bp, synthetic construct
  source 1..15: mol_type = other DNA
caaaactagggcaaa

SEQ ID NO: 2378 - DNA, 15 bp, synthetic construct
  source 1..15: mol_type = other DNA
gacaatgttctggtt

SEQ ID NO: 2379 - DNA, 15 bp, synthetic construct
  source 1..15: mol_type = other DNA
agatgatattaggat

SEQ ID NO: 2380 - DNA, 15 bp, synthetic construct
  source 1..15: mol_type = other DNA
gttacttaaggatgg

SEQ ID NO: 2381 - DNA, 15 bp, synthetic construct
  source 1..15: mol_type = other DNA
atgtcttcttcatct

SEQ ID NO: 2382 - DNA, 15 bp, synthetic construct
  source 1..15: mol_type = other DNA
ttactactacttggg

SEQ ID NO: 2383 - DNA, 15 bp, synthetic construct
  source 1..15: mol_type = other DNA
atcctcagtggtgtt

SEQ ID NO: 2384 - DNA, 15 bp, synthetic construct
  source 1..15: mol_type = other DNA
aatttcagtgttggc

SEQ ID NO: 2385 - DNA, 15 bp, synthetic construct
  source 1..15: mol_type = other DNA
gtgttctcattgggc

SEQ ID NO: 2386 - DNA, 15 bp, synthetic construct
  source 1..15: mol_type = other DNA
taaatcagtagagca

SEQ ID NO: 2387 - DNA, 15 bp, synthetic construct
  source 1..15: mol_type = other DNA
gtcaaaatctccaca

SEQ ID NO: 2388 - DNA, 15 bp, synthetic construct
  source 1..15: mol_type = other DNA
tgaggtatatctgtt

SEQ ID NO: 2389 - DNA, 15 bp, synthetic construct
  source 1..15: mol_type = other DNA
agaagcaggatgtct

SEQ ID NO: 2390 - DNA, 15 bp, synthetic construct
  source 1..15: mol_type = other DNA
ctaactgatgcttct

SEQ ID NO: 2391 - DNA, 15 bp, synthetic construct
  source 1..15: mol_type = other DNA
agtaaattcagcatt

SEQ ID NO: 2392 - DNA, 15 bp, synthetic construct
  source 1..15: mol_type = other DNA
taaaaagttagcttc

SEQ ID NO: 2393 - DNA, 15 bp, synthetic construct
  source 1..15: mol_type = other DNA
cttcttaatatcagc

SEQ ID NO: 2394 - DNA, 15 bp, synthetic construct
  source 1..15: mol_type = other DNA
gtgcccaatatctta

SEQ ID NO: 2395 - DNA, 15 bp, synthetic construct
  source 1..15: mol_type = other DNA
gggagggcgtcgtgg

SEQ ID NO: 2396 - DNA, 15 bp, synthetic construct
  source 1..15: mol_type = other DNA
gccgaggtgactgtg

SEQ ID NO: 2397 - DNA, 15 bp, synthetic construct
  source 1..15: mol_type = other DNA
cggtcgcaactctgt

SEQ ID NO: 2398 - DNA, 15 bp, synthetic construct
  source 1..15: mol_type = other DNA
gtacgggcgctgctg

SEQ ID NO: 2399 - DNA, 15 bp, synthetic construct
  source 1..15: mol_type = other DNA
gtactcgcgtcgctg

SEQ ID NO: 2400 - DNA, 15 bp, synthetic construct
  source 1..15: mol_type = other DNA
cgtccttgccttctt

SEQ ID NO: 2401 - DNA, 15 bp, synthetic construct
  source 1..15: mol_type = other DNA
tgatttttggttcca

SEQ ID NO: 2402 - DNA, 15 bp, synthetic construct
  source 1..15: mol_type = other DNA
tccttaagcaaaacc

SEQ ID NO: 2403 - DNA, 15 bp, synthetic construct
  source 1..15: mol_type = other DNA
gcattctttctcatt

SEQ ID NO: 2404 - DNA, 15 bp, synthetic construct
  source 1..15: mol_type = other DNA
aagtccacgtttctc

SEQ ID NO: 2405 - DNA, 15 bp, synthetic construct
  source 1..15: mol_type = other DNA
ttccaccgtgcagtc

SEQ ID NO: 2406 - DNA, 15 bp, synthetic construct
  source 1..15: mol_type = other DNA
aggtggcttttagtt

SEQ ID NO: 2407 - DNA, 15 bp, synthetic construct
  source 1..15: mol_type = other DNA
gattatgactatggc

SEQ ID NO: 2408 - DNA, 15 bp, synthetic construct
  source 1..15: mol_type = other DNA
aaccctgtccataag

SEQ ID NO: 2409 - DNA, 15 bp, synthetic construct
  source 1..15: mol_type = other DNA
tgcttccataagcca

SEQ ID NO: 2410 - DNA, 15 bp, synthetic construct
  source 1..15: mol_type = other DNA
aagtgtgtagaatgt

SEQ ID NO: 2411 - DNA, 15 bp, synthetic construct
  source 1..15: mol_type = other DNA
aagcattactgcaca

SEQ ID NO: 2412 - DNA, 15 bp, synthetic construct
  source 1..15: mol_type = other DNA
aaaatttgggactgt

SEQ ID NO: 2413 - DNA, 15 bp, synthetic construct
  source 1..15: mol_type = other DNA
ctggacaggtaaaag

SEQ ID NO: 2414 - DNA, 15 bp, synthetic construct
  source 1..15: mol_type = other DNA
gatgactcttgcctt

SEQ ID NO: 2415 - DNA, 15 bp, synthetic construct
  source 1..15: mol_type = other DNA
agaatgtagctacct

SEQ ID NO: 2416 - DNA, 15 bp, synthetic construct
  source 1..15: mol_type = other DNA
cagcttatatctgtc

SEQ ID NO: 2417 - DNA, 15 bp, synthetic construct
  source 1..15: mol_type = other DNA
tggcatgctcataga

SEQ ID NO: 2418 - DNA, 15 bp, synthetic construct
  source 1..15: mol_type = other DNA
aggacttggtatgtg

SEQ ID NO: 2419 - DNA, 15 bp, synthetic construct
  source 1..15: mol_type = other DNA
tagaatcactggcat

SEQ ID NO: 2420 - DNA, 15 bp, synthetic construct
  source 1..15: mol_type = other DNA
actcgcatcttacca

SEQ ID NO: 2421 - DNA, 15 bp, synthetic construct
  source 1..15: mol_type = other DNA
ttagacctgataaag

SEQ ID NO: 2422 - DNA, 15 bp, synthetic construct
  source 1..15: mol_type = other DNA
aacgaactctctgtg

SEQ ID NO: 2423 - DNA, 15 bp, synthetic construct
  source 1..15: mol_type = other DNA
atactctgtgctatt

SEQ ID NO: 2424 - DNA, 15 bp, synthetic construct
  source 1..15: mol_type = other DNA
ctcacttagtgtagc

SEQ ID NO: 2425 - DNA, 15 bp, synthetic construct
  source 1..15: mol_type = other DNA
tttctccataatcct

SEQ ID NO: 2426 - DNA, 15 bp, synthetic construct
  source 1..15: mol_type = other DNA
aattcacaaaagaca

SEQ ID NO: 2427 - DNA, 15 bp, synthetic construct
  source 1..15: mol_type = other DNA
aaaatctggaagagt

SEQ ID NO: 2428 - DNA, 15 bp, synthetic construct
  source 1..15: mol_type = other DNA
cagcgtggcattttg

SEQ ID NO: 2429 - DNA, 15 bp, synthetic construct
  source 1..15: mol_type = other DNA
atgagcaccaaagag

SEQ ID NO: 2430 - DNA, 15 bp, synthetic construct
  source 1..15: mol_type = other DNA
ctgaaaacaaatcca

SEQ ID NO: 2431 - DNA, 15 bp, synthetic construct
  source 1..15: mol_type = other DNA
aagcaggatcaatga

SEQ ID NO: 2432 - DNA, 15 bp, synthetic construct
  source 1..15: mol_type = other DNA
ttaatcatgtctcgt

SEQ ID NO: 2433 - DNA, 15 bp, synthetic construct
  source 1..15: mol_type = other DNA
aaaccagaaatatac

SEQ ID NO: 2434 - DNA, 15 bp, synthetic construct
  source 1..15: mol_type = other DNA
attgagtgaataggc

SEQ ID NO: 2435 - DNA, 15 bp, synthetic construct
  source 1..15: mol_type = other DNA
tgatatcctttccca

SEQ ID NO: 2436 - DNA, 15 bp, synthetic construct
  source 1..15: mol_type = other DNA
tactggtatttttat

SEQ ID NO: 2437 - DNA, 15 bp, synthetic construct
  source 1..15: mol_type = other DNA
gaaggcataaaccaa

SEQ ID NO: 2438 - DNA, 15 bp, synthetic construct
  source 1..15: mol_type = other DNA
tcattggtattgaca

SEQ ID NO: 2439 - DNA, 15 bp, synthetic construct
  source 1..15: mol_type = other DNA
cccttaggttaggtt

SEQ ID NO: 2440 - DNA, 15 bp, synthetic construct
  source 1..15: mol_type = other DNA
actcagaaacacttt

SEQ ID NO: 2441 - DNA, 15 bp, synthetic construct
  source 1..15: mol_type = other DNA
gacttacacttcttt

SEQ ID NO: 2442 - DNA, 15 bp, synthetic construct
  source 1..15: mol_type = other DNA
acaagcttacccaac

SEQ ID NO: 2443 - DNA, 15 bp, synthetic construct
  source 1..15: mol_type = other DNA
cttagggagattcca

SEQ ID NO: 2444 - DNA, 15 bp, synthetic construct
  source 1..15: mol_type = other DNA
ttattgtcacagcaa

SEQ ID NO: 2445 - DNA, 15 bp, synthetic construct
  source 1..15: mol_type = other DNA
gtgtaatgtcacact

SEQ ID NO: 2446 - DNA, 15 bp, synthetic construct
  source 1..15: mol_type = other DNA
ttttcggtagttgga

SEQ ID NO: 2447 - DNA, 15 bp, synthetic construct
  source 1..15: mol_type = other DNA
taaagcaggcaatag

SEQ ID NO: 2448 - DNA, 15 bp, synthetic construct
  source 1..15: mol_type = other DNA
atacttactttgctt

SEQ ID NO: 2449 - DNA, 15 bp, synthetic construct
  source 1..15: mol_type = other DNA
agcttggctatgagg

SEQ ID NO: 2450 - DNA, 15 bp, synthetic construct
  source 1..15: mol_type = other DNA
tttgattccaaagga

SEQ ID NO: 2451 - DNA, 15 bp, synthetic construct
  source 1..15: mol_type = other DNA
cctaaggcgatatgg

SEQ ID NO: 2452 - DNA, 15 bp, synthetic construct
  source 1..15: mol_type = other DNA
gggaaggtaagtagg

SEQ ID NO: 2453 - DNA, 15 bp, synthetic construct
  source 1..15: mol_type = other DNA
acagcgagatcctct

SEQ ID NO: 2454 - DNA, 15 bp, synthetic construct
  source 1..15: mol_type = other DNA
gaccatacctgttgc

SEQ ID NO: 2455 - DNA, 15 bp, synthetic construct
  source 1..15: mol_type = other DNA
aacatttgacccttc

SEQ ID NO: 2456 - DNA, 15 bp, synthetic construct
  source 1..15: mol_type = other DNA
tgtatgcctagtcac

SEQ ID NO: 2457 - DNA, 15 bp, synthetic construct
  source 1..15: mol_type = other DNA
taatgtctgttgttt

SEQ ID NO: 2458 - DNA, 15 bp, synthetic construct
  source 1..15: mol_type = other DNA
cattttcccagataa

SEQ ID NO: 2459 - DNA, 15 bp, synthetic construct
  source 1..15: mol_type = other DNA
tttgtcagtaacagt

SEQ ID NO: 2460 - DNA, 15 bp, synthetic construct
  source 1..15: mol_type = other DNA
ttcagagccagagta

SEQ ID NO: 2461 - DNA, 15 bp, synthetic construct
  source 1..15: mol_type = other DNA
tggagaaaacaatca

SEQ ID NO: 2462 - DNA, 15 bp, synthetic construct
  source 1..15: mol_type = other DNA
gctcacctggtttcc

SEQ ID NO: 2463 - DNA, 15 bp, synthetic construct
  source 1..15: mol_type = other DNA
ttctaagaaaattgc

SEQ ID NO: 2464 - DNA, 15 bp, synthetic construct
  source 1..15: mol_type = other DNA
cataaaggttggtgg

SEQ ID NO: 2465 - DNA, 15 bp, synthetic construct
  source 1..15: mol_type = other DNA
catttctcatgtttc

SEQ ID NO: 2466 - DNA, 15 bp, synthetic construct
  source 1..15: mol_type = other DNA
tgagatgaatcgacg

SEQ ID NO: 2467 - DNA, 15 bp, synthetic construct
  source 1..15: mol_type = other DNA
gagattatgccttgc

SEQ ID NO: 2468 - DNA, 15 bp, synthetic construct
  source 1..15: mol_type = other DNA
atctgtatttctcct

SEQ ID NO: 2469 - DNA, 15 bp, synthetic construct
  source 1..15: mol_type = other DNA
aaagcaacactttga

SEQ ID NO: 2470 - DNA, 15 bp, synthetic construct
  source 1..15: mol_type = other DNA
gtttcagaaagcaca

SEQ ID NO: 2471 - DNA, 15 bp, synthetic construct
  source 1..15: mol_type = other DNA
agaacacccactttt

SEQ ID NO: 2472 - DNA, 15 bp, synthetic construct
  source 1..15: mol_type = other DNA
atttccatttcttca

SEQ ID NO: 2473 - DNA, 15 bp, synthetic construct
  source 1..15: mol_type = other DNA
cccaaaaatcttgac

SEQ ID NO: 2474 - DNA, 15 bp, synthetic construct
  source 1..15: mol_type = other DNA
agcaaacagtgtgta

SEQ ID NO: 2475 - DNA, 15 bp, synthetic construct
  source 1..15: mol_type = other DNA
actacacggctgtcg

SEQ ID NO: 2476 - DNA, 15 bp, synthetic construct
  source 1..15: mol_type = other DNA
caaatgaaagactcc

SEQ ID NO: 2477 - DNA, 15 bp, synthetic construct
  source 1..15: mol_type = other DNA
tgtaaaccttcacct

SEQ ID NO: 2478 - DNA, 15 bp, synthetic construct
  source 1..15: mol_type = other DNA
tacaaccatatccat

SEQ ID NO: 2479 - DNA, 15 bp, synthetic construct
  source 1..15: mol_type = other DNA
tcattagctttcata

SEQ ID NO: 2480 - DNA, 15 bp, synthetic construct
  source 1..15: mol_type = other DNA
atacccactatccaa

SEQ ID NO: 2481 - DNA, 15 bp, synthetic construct
  source 1..15: mol_type = other DNA
ataatagtttttcat

SEQ ID NO: 2482 - DNA, 15 bp, synthetic construct
  source 1..15: mol_type = other DNA
ttaccatctacacta

SEQ ID NO: 2483 - DNA, 15 bp, synthetic construct
  source 1..15: mol_type = other DNA
aatggtatagctgtg

SEQ ID NO: 2484 - DNA, 15 bp, synthetic construct
  source 1..15: mol_type = other DNA
tggtgataaagaata

SEQ ID NO: 2485 - DNA, 15 bp, synthetic construct
  source 1..15: mol_type = other DNA
atacagcagcagaat

SEQ ID NO: 2486 - DNA, 15 bp, synthetic construct
  source 1..15: mol_type = other DNA
tcttcaacacttaaa

SEQ ID NO: 2487 - DNA, 15 bp, synthetic construct
  source 1..15: mol_type = other DNA
aacatgaaaaacaaa

SEQ ID NO: 2488 - DNA, 15 bp, synthetic construct
  source 1..15: mol_type = other DNA
ctcctatttgcattt

SEQ ID NO: 2489 - DNA, 15 bp, synthetic construct
  source 1..15: mol_type = other DNA
agaatggctcaccta

SEQ ID NO: 2490 - DNA, 15 bp, synthetic construct
  source 1..15: mol_type = other DNA
actttttatggtaat

SEQ ID NO: 2491 - DNA, 15 bp, synthetic construct
  source 1..15: mol_type = other DNA
gttcagttgttggtt

SEQ ID NO: 2492 - DNA, 15 bp, synthetic construct
  source 1..15: mol_type = other DNA
gttaaaccaacacct

SEQ ID NO: 2493 - DNA, 15 bp, synthetic construct
  source 1..15: mol_type = other DNA
aaagtgttatagctg

SEQ ID NO: 2494 - DNA, 15 bp, synthetic construct
  source 1..15: mol_type = other DNA
ctaaacatactgata

SEQ ID NO: 2495 - DNA, 15 bp, synthetic construct
  source 1..15: mol_type = other DNA
atcattctgttttat

SEQ ID NO: 2496 - DNA, 15 bp, synthetic construct
  source 1..15: mol_type = other DNA
gaggacaagtttgga

SEQ ID NO: 2497 - DNA, 15 bp, synthetic construct
  source 1..15: mol_type = other DNA
ctatgagatggcatg

SEQ ID NO: 2498 - DNA, 15 bp, synthetic construct
  source 1..15: mol_type = other DNA
tactgccggatttgt

SEQ ID NO: 2499 - DNA, 15 bp, synthetic construct
  source 1..15: mol_type = other DNA
tgcctagccaaggtt

SEQ ID NO: 2500 - DNA, 15 bp, synthetic construct
  source 1..15: mol_type = other DNA
tgattgtggtaagaa

SEQ ID NO: 2501 - DNA, 15 bp, synthetic construct
  source 1..15: mol_type = other DNA
tgatgctgaagagtt

SEQ ID NO: 2502 - DNA, 15 bp, synthetic construct
  source 1..15: mol_type = other DNA
gtcatattttgctga

SEQ ID NO: 2503 - DNA, 15 bp, synthetic construct
  source 1..15: mol_type = other DNA
ttctgtatgtttttg

SEQ ID NO: 2504 - DNA, 15 bp, synthetic construct
  source 1..15: mol_type = other DNA
gtctcttccgccaag

SEQ ID NO: 2505 - DNA, 15 bp, synthetic construct
  source 1..15: mol_type = other DNA
tggaaaactattgct

SEQ ID NO: 2506 - DNA, 15 bp, synthetic construct
  source 1..15: mol_type = other DNA
aaggaaatccactaa

SEQ ID NO: 2507 - DNA, 15 bp, synthetic construct
  source 1..15: mol_type = other DNA
agacagaagtgattt

SEQ ID NO: 2508 - DNA, 15 bp, synthetic construct
  source 1..15: mol_type = other DNA
tccaacaagtgtttt

SEQ ID NO: 2509 - DNA, 15 bp, synthetic construct
  source 1..15: mol_type = other DNA
acaaggtacactgga

SEQ ID NO: 2510 - DNA, 15 bp, synthetic construct
  source 1..15: mol_type = other DNA
aaaatgtcgaagggc

SEQ ID NO: 2511 - DNA, 15 bp, synthetic construct
  source 1..15: mol_type = other DNA
gactgtatctttggt

SEQ ID NO: 2512 - DNA, 15 bp, synthetic construct
  source 1..15: mol_type = other DNA
aaaatgtcgaagggc

SEQ ID NO: 2513 - DNA, 15 bp, synthetic construct
  source 1..15: mol_type = other DNA
gactgtatctttggt

SEQ ID NO: 2514 - DNA, 15 bp, synthetic construct
  source 1..15: mol_type = other DNA
gatttacaatgagaa

SEQ ID NO: 2515 - DNA, 15 bp, synthetic construct
  source 1..15: mol_type = other DNA
gtgcccatatctgaa

SEQ ID NO: 2516 - DNA, 15 bp, synthetic construct
  source 1..15: mol_type = other DNA
caactagggacggag

SEQ ID NO: 2517 - DNA, 15 bp, synthetic construct
  source 1..15: mol_type = other DNA
aagaacatgttgtgt

SEQ ID NO: 2518 - DNA, 15 bp, synthetic construct
  source 1..15: mol_type = other DNA
agtagttccatgggg

SEQ ID NO: 2519 - DNA, 15 bp, synthetic construct
  source 1..15: mol_type = other DNA
cgtattttcctcatt

SEQ ID NO: 2520 - DNA, 15 bp, synthetic construct
  source 1..15: mol_type = other DNA
cttttaaaataagct

SEQ ID NO: 2521 - DNA, 15 bp, synthetic construct
  source 1..15: mol_type = other DNA
gtgttcagatggaac

SEQ ID NO: 2522 - DNA, 15 bp, synthetic construct
  source 1..15: mol_type = other DNA
caatctctgcacaaa

SEQ ID NO: 2523 - DNA, 15 bp, synthetic construct
  source 1..15: mol_type = other DNA
tctcaataagacatt

SEQ ID NO: 2524 - DNA, 15 bp, synthetic construct
  source 1..15: mol_type = other DNA
tgtagctgtttggcc

SEQ ID NO: 2525 - DNA, 15 bp, synthetic construct
  source 1..15: mol_type = other DNA
actgtcagctctcat

SEQ ID NO: 2526 - DNA, 15 bp, synthetic construct
  source 1..15: mol_type = other DNA
acaaatgtgtttacc

SEQ ID NO: 2527 - DNA, 15 bp, synthetic construct
  source 1..15: mol_type = other DNA
agaaaattttaaccg

SEQ ID NO: 2528 - DNA, 15 bp, synthetic construct
  source 1..15: mol_type = other DNA
agtggcattctgata

SEQ ID NO: 2529 - DNA, 15 bp, synthetic construct
  source 1..15: mol_type = other DNA
aaagttcttcagcat

SEQ ID NO: 2530 - DNA, 15 bp, synthetic construct
  source 1..15: mol_type = other DNA
gactttcataccagg

SEQ ID NO: 2531 - DNA, 15 bp, synthetic construct
  source 1..15: mol_type = other DNA
ttgaatgccattctc

SEQ ID NO: 2532 - DNA, 15 bp, synthetic construct
  source 1..15: mol_type = other DNA
tcgaggacagggtat

SEQ ID NO: 2533 - DNA, 15 bp, synthetic construct
  source 1..15: mol_type = other DNA
tgccctttaatggga

SEQ ID NO: 2534 - DNA, 15 bp, synthetic construct
  source 1..15: mol_type = other DNA
ttttactgtgatggc

SEQ ID NO: 2535 - DNA, 15 bp, synthetic construct
  source 1..15: mol_type = other DNA
tgtgttcaatatgct

SEQ ID NO: 2536 - DNA, 15 bp, synthetic construct
  source 1..15: mol_type = other DNA
aacgatctgtaaagt

SEQ ID NO: 2537 - DNA, 15 bp, synthetic construct
  source 1..15: mol_type = other DNA
cccaaggagatattg

SEQ ID NO: 2538 - DNA, 15 bp, synthetic construct
  source 1..15: mol_type = other DNA
aaataaggctgttcg

SEQ ID NO: 2539 - DNA, 15 bp, synthetic construct
  source 1..15: mol_type = other DNA
tatgagaaaatctcc

SEQ ID NO: 2540 - DNA, 15 bp, synthetic construct
  source 1..15: mol_type = other DNA
cattttctactaata

SEQ ID NO: 2541 - DNA, 15 bp, synthetic construct
  source 1..15: mol_type = other DNA
atgggagaaatagca

SEQ ID NO: 2542 - DNA, 15 bp, synthetic construct
  source 1..15: mol_type = other DNA
tctccatttaagcgg

SEQ ID NO: 2543 - DNA, 15 bp, synthetic construct
  source 1..15: mol_type = other DNA
gcactccaaggaaat

SEQ ID NO: 2544 - DNA, 15 bp, synthetic construct
  source 1..15: mol_type = other DNA
gagggtgatatgtct

SEQ ID NO: 2545 - DNA, 15 bp, synthetic construct
  source 1..15: mol_type = other DNA
gatctccatttctta

SEQ ID NO: 2546 - DNA, 15 bp, synthetic construct
  source 1..15: mol_type = other DNA
tttatttacgcttgt

SEQ ID NO: 2547 - DNA, 15 bp, synthetic construct
  source 1..15: mol_type = other DNA
ggcgttgcatctcag

SEQ ID NO: 2548 - DNA, 15 bp, synthetic construct
  source 1..15: mol_type = other DNA
gaacagttcttacta

SEQ ID NO: 2549 - DNA, 15 bp, synthetic construct
  source 1..15: mol_type = other DNA
gtattagttaagtca

SEQ ID NO: 2550 - DNA, 15 bp, synthetic construct
  source 1..15: mol_type = other DNA
taatgcatcaaagaa

SEQ ID NO: 2551 - DNA, 15 bp, synthetic construct
  source 1..15: mol_type = other DNA
aaaaataaacgacaa

SEQ ID NO: 2552 - DNA, 15 bp, synthetic construct
  source 1..15: mol_type = other DNA
aagaggcaaaccttc

SEQ ID NO: 2553 - DNA, 15 bp, synthetic construct
  source 1..15: mol_type = other DNA
catttgaaatctaag

SEQ ID NO: 2554 - DNA, 15 bp, synthetic construct
  source 1..15: mol_type = other DNA
gccattacaaaacaa

SEQ ID NO: 2555 - DNA, 15 bp, synthetic construct
  source 1..15: mol_type = other DNA
tagcttgaagagtgc

SEQ ID NO: 2556 - DNA, 15 bp, synthetic construct
  source 1..15: mol_type = other DNA
gagtgtgggcagtag

SEQ ID NO: 2557 - DNA, 15 bp, synthetic construct
  source 1..15: mol_type = other DNA
agcaatcagaatttg

SEQ ID NO: 2558 - DNA, 15 bp, synthetic construct
  source 1..15: mol_type = other DNA
actagggcagacaca

SEQ ID NO: 2559 - DNA, 15 bp, synthetic construct
  source 1..15: mol_type = other DNA
agactttgaaatctt

SEQ ID NO: 2560 - DNA, 15 bp, synthetic construct
  source 1..15: mol_type = other DNA
ttccacttattttat

SEQ ID NO: 2561 - DNA, 15 bp, synthetic construct
  source 1..15: mol_type = other DNA
gctttgttagtgtgt

SEQ ID NO: 2562 - DNA, 15 bp, synthetic construct
  source 1..15: mol_type = other DNA
taatgtatatgcaca

SEQ ID NO: 2563 - DNA, 15 bp, synthetic construct
  source 1..15: mol_type = other DNA
catgccctcgaataa

SEQ ID NO: 2564 - DNA, 15 bp, synthetic construct
  source 1..15: mol_type = other DNA
agagacttgtgtcat

SEQ ID NO: 2565 - DNA, 15 bp, synthetic construct
  source 1..15: mol_type = other DNA
tgatatgaaagatca

SEQ ID NO: 2566 - DNA, 15 bp, synthetic construct
  source 1..15: mol_type = other DNA
gtcctacacaaatgc

SEQ ID NO: 2567 - DNA, 15 bp, synthetic construct
  source 1..15: mol_type = other DNA
tattacaagaggaaa

SEQ ID NO: 2568 - DNA, 15 bp, synthetic construct
  source 1..15: mol_type = other DNA
tcattcccatcttgg

SEQ ID NO: 2569 - DNA, 15 bp, synthetic construct
  source 1..15: mol_type = other DNA
gatttcactaacaga

SEQ ID NO: 2570 - DNA, 15 bp, synthetic construct
  source 1..15: mol_type = other DNA
agatactactggata

SEQ ID NO: 2571 - DNA, 15 bp, synthetic construct
  source 1..15: mol_type = other DNA
taccagatagagaag

SEQ ID NO: 2572 - DNA, 15 bp, synthetic construct
  source 1..15: mol_type = other DNA
tgctttatcatggcg

SEQ ID NO: 2573 - DNA, 15 bp, synthetic construct
  source 1..15: mol_type = other DNA
atacctgatccagaa

SEQ ID NO: 2574 - DNA, 15 bp, synthetic construct
  source 1..15: mol_type = other DNA
actgaatgacttggt

SEQ ID NO: 2575 - DNA, 15 bp, synthetic construct
  source 1..15: mol_type = other DNA
attcttgctttgcac

SEQ ID NO: 2576 - DNA, 15 bp, synthetic construct
  source 1..15: mol_type = other DNA
cttagtgcaaagcaa

SEQ ID NO: 2577 - DNA, 15 bp, synthetic construct
  source 1..15: mol_type = other DNA
agtatttcagagcac

SEQ ID NO: 2578 - DNA, 15 bp, synthetic construct
  source 1..15: mol_type = other DNA
ccgagctccctccgc

SEQ ID NO: 2579 - DNA, 15 bp, synthetic construct
  source 1..15: mol_type = other DNA
cctctccctccgaca

SEQ ID NO: 2580 - DNA, 15 bp, synthetic construct
  source 1..15: mol_type = other DNA
agacgtcgtgacaga

SEQ ID NO: 2581 - DNA, 15 bp, synthetic construct
  source 1..15: mol_type = other DNA
tcgggaatcttggaa

SEQ ID NO: 2582 - DNA, 15 bp, synthetic construct
  source 1..15: mol_type = other DNA
tagattgcaagcagg

SEQ ID NO: 2583 - DNA, 15 bp, synthetic construct
  source 1..15: mol_type = other DNA
actgacaaatgatgc

SEQ ID NO: 2584 - DNA, 15 bp, synthetic construct
  source 1..15: mol_type = other DNA
aatactgggccagaa

SEQ ID NO: 2585 - DNA, 15 bp, synthetic construct
  source 1..15: mol_type = other DNA
aaaggcaccatgcaa

SEQ ID NO: 2586 - DNA, 15 bp, synthetic construct
  source 1..15: mol_type = other DNA
atcatgctctttaca

SEQ ID NO: 2587 - DNA, 15 bp, synthetic construct
  source 1..15: mol_type = other DNA
agtttggcctcgtaa

SEQ ID NO: 2588 - DNA, 15 bp, synthetic construct
  source 1..15: mol_type = other DNA
atcatgctctttaca

SEQ ID NO: 2589 - DNA, 15 bp, synthetic construct
  source 1..15: mol_type = other DNA
agtttggcctcgtaa

SEQ ID NO: 2590 - DNA, 15 bp, synthetic construct
  source 1..15: mol_type = other DNA
tctgtaagtctaaaa

SEQ ID NO: 2591 - DNA, 15 bp, synthetic construct
  source 1..15: mol_type = other DNA
tctgtaagtctaaaa

SEQ ID NO: 2592 - DNA, 15 bp, synthetic construct
  source 1..15: mol_type = other DNA
tcctggaagccctag

SEQ ID NO: 2593 - DNA, 15 bp, synthetic construct
  source 1..15: mol_type = other DNA
ccctcacccaattcg

SEQ ID NO: 2594 - DNA, 15 bp, synthetic construct
  source 1..15: mol_type = other DNA
gagttgtcttttgtt

SEQ ID NO: 2595 - DNA, 15 bp, synthetic construct
  source 1..15: mol_type = other DNA
aaaacactgtcccaa

SEQ ID NO: 2596 - DNA, 15 bp, synthetic construct
  source 1..15: mol_type = other DNA
agttattctggtgat

SEQ ID NO: 2597 - DNA, 15 bp, synthetic construct
  source 1..15: mol_type = other DNA
ccaattaactattga

SEQ ID NO: 2598 - DNA, 15 bp, synthetic construct
  source 1..15: mol_type = other DNA
gaattctgttcttta

SEQ ID NO: 2599 - DNA, 15 bp, synthetic construct
  source 1..15: mol_type = other DNA
agctggatgatggct

SEQ ID NO: 2600 - DNA, 15 bp, synthetic construct
  source 1..15: mol_type = other DNA
agctggatgatggct

SEQ ID NO: 2601 - DNA, 15 bp, synthetic construct
  source 1..15: mol_type = other DNA
agtttttccacagga

SEQ ID NO: 2602 - DNA, 15 bp, synthetic construct
  source 1..15: mol_type = other DNA
ggatatgttcttggc

SEQ ID NO: 2603 - DNA, 15 bp, synthetic construct
  source 1..15: mol_type = other DNA
atctgtatattcacc

SEQ ID NO: 2604 - DNA, 15 bp, synthetic construct
  source 1..15: mol_type = other DNA
tctcatggtacattt

SEQ ID NO: 2605 - DNA, 15 bp, synthetic construct
  source 1..15: mol_type = other DNA
accatcaaaatctca

SEQ ID NO: 2606 - DNA, 15 bp, synthetic construct
  source 1..15: mol_type = other DNA
tccttagcccactga

SEQ ID NO: 2607 - DNA, 15 bp, synthetic construct
  source 1..15: mol_type = other DNA
ggataagatgggaat

SEQ ID NO: 2608 - DNA, 15 bp, synthetic construct
  source 1..15: mol_type = other DNA
ctattcccatcttat

SEQ ID NO: 2609 - DNA, 15 bp, synthetic construct
  source 1..15: mol_type = other DNA
caactcaaggtcaat

SEQ ID NO: 2610 - DNA, 15 bp, synthetic construct
  source 1..15: mol_type = other DNA
acaagatcgtgaacc

SEQ ID NO: 2611 - DNA, 15 bp, synthetic construct
  source 1..15: mol_type = other DNA
actttttcctcaatc

SEQ ID NO: 2612 - DNA, 15 bp, synthetic construct
  source 1..15: mol_type = other DNA
cgccatggtgtcctg

SEQ ID NO: 2613 - DNA, 15 bp, synthetic construct
  source 1..15: mol_type = other DNA
atgcgtcccggcgaa

SEQ ID NO: 2614 - DNA, 15 bp, synthetic construct
  source 1..15: mol_type = other DNA
cctcctcctcatcgg

SEQ ID NO: 2615 - DNA, 15 bp, synthetic construct
  source 1..15: mol_type = other DNA
tgctgggcactcttt

SEQ ID NO: 2616 - DNA, 15 bp, synthetic construct
  source 1..15: mol_type = other DNA
cttctgccgttgtag

SEQ ID NO: 2617 - DNA, 15 bp, synthetic construct
  source 1..15: mol_type = other DNA
cttgagcgcattctg

SEQ ID NO: 2618 - DNA, 15 bp, synthetic construct
  source 1..15: mol_type = other DNA
gctgccgtatgtcgc

SEQ ID NO: 2619 - DNA, 15 bp, synthetic construct
  source 1..15: mol_type = other DNA
gacaccatgtcgata

SEQ ID NO: 2620 - DNA, 15 bp, synthetic construct
  source 1..15: mol_type = other DNA
gcccttaccagcacg

SEQ ID NO: 2621 - DNA, 15 bp, synthetic construct
  source 1..15: mol_type = other DNA
tagtcctttcttttc

SEQ ID NO: 2622 - DNA, 15 bp, synthetic construct
  source 1..15: mol_type = other DNA
cttgtgcttttgttt

SEQ ID NO: 2623 - DNA, 15 bp, synthetic construct
  source 1..15: mol_type = other DNA
gagacaattttcttg

SEQ ID NO: 2624 - DNA, 15 bp, synthetic construct
  source 1..15: mol_type = other DNA
ggctgctacgaacct

SEQ ID NO: 2625 - DNA, 15 bp, synthetic construct
  source 1..15: mol_type = other DNA
agagccagataaggg

SEQ ID NO: 2626 - DNA, 15 bp, synthetic construct
  source 1..15: mol_type = other DNA
gacaaatactgggtc

SEQ ID NO: 2627 - DNA, 15 bp, synthetic construct
  source 1..15: mol_type = other DNA
actgggaaacaattt

SEQ ID NO: 2628 - DNA, 15 bp, synthetic construct
  source 1..15: mol_type = other DNA
tgttacaccacttta

SEQ ID NO: 2629 - DNA, 15 bp, synthetic construct
  source 1..15: mol_type = other DNA
ctccagccatggatt

SEQ ID NO: 2630 - DNA, 15 bp, synthetic construct
  source 1..15: mol_type = other DNA
taagatccatgcctg

SEQ ID NO: 2631 - DNA, 15 bp, synthetic construct
  source 1..15: mol_type = other DNA
gagaggactgctgtt

SEQ ID NO: 2632 - DNA, 15 bp, synthetic construct
  source 1..15: mol_type = other DNA
taacaatagttaccc

SEQ ID NO: 2633 - DNA, 15 bp, synthetic construct
  source 1..15: mol_type = other DNA
tatctctgagtcagc

SEQ ID NO: 2634 - DNA, 15 bp, synthetic construct
  source 1..15: mol_type = other DNA
gtgtaaaggtggatt

SEQ ID NO: 2635 - DNA, 15 bp, synthetic construct
  source 1..15: mol_type = other DNA
gcacctattgttctc

SEQ ID NO: 2636 - DNA, 15 bp, synthetic construct
  source 1..15: mol_type = other DNA
ggtataactgaagta

SEQ ID NO: 2637 - DNA, 15 bp, synthetic construct
  source 1..15: mol_type = other DNA
tagactagagaagga

SEQ ID NO: 2638 - DNA, 15 bp, synthetic construct
  source 1..15: mol_type = other DNA
tgacacattttgctc

SEQ ID NO: 2639 - DNA, 15 bp, synthetic construct
  source 1..15: mol_type = other DNA
ttggtctcttttctc

SEQ ID NO: 2640 - DNA, 15 bp, synthetic construct
  source 1..15: mol_type = other DNA
ctggaatggatacgc

SEQ ID NO: 2641 - DNA, 15 bp, synthetic construct
  source 1..15: mol_type = other DNA
tacttgtcatgaaat

SEQ ID NO: 2642 - DNA, 15 bp, synthetic construct
  source 1..15: mol_type = other DNA
aagttgtgatttcat

SEQ ID NO: 2643 - DNA, 15 bp, synthetic construct
  source 1..15: mol_type = other DNA
tttatcaactctgaa

SEQ ID NO: 2644 - DNA, 15 bp, synthetic construct
  source 1..15: mol_type = other DNA
ttatttttcttcaag

SEQ ID NO: 2645 - DNA, 15 bp, synthetic construct
  source 1..15: mol_type = other DNA
gaccagttttgtgta

SEQ ID NO: 2646 - DNA, 15 bp, synthetic construct
  source 1..15: mol_type = other DNA
agctaggagtagaag

SEQ ID NO: 2647 - DNA, 15 bp, synthetic construct
  source 1..15: mol_type = other DNA
tctacttacggcttt

SEQ ID NO: 2648 - DNA, 15 bp, synthetic construct
  source 1..15: mol_type = other DNA
cattatatttatagc

SEQ ID NO: 2649 - DNA, 15 bp, synthetic construct
  source 1..15: mol_type = other DNA
ctggagaatagttag

SEQ ID NO: 2650 - DNA, 15 bp, synthetic construct
  source 1..15: mol_type = other DNA
tgaagttcttttctc

SEQ ID NO: 2651 - DNA, 15 bp, synthetic construct
  source 1..15: mol_type = other DNA
ttatcatgtcatcaa

SEQ ID NO: 2652 - DNA, 15 bp, synthetic construct
  source 1..15: mol_type = other DNA
gatctttgctcaagt

SEQ ID NO: 2653 - DNA, 15 bp, synthetic construct
  source 1..15: mol_type = other DNA
ctcaatgaagtggag

SEQ ID NO: 2654 - DNA, 15 bp, synthetic construct
  source 1..15: mol_type = other DNA
agttctcttctgact

SEQ ID NO: 2655 - DNA, 15 bp, synthetic construct
  source 1..15: mol_type = other DNA
tcttcattttccatt

SEQ ID NO: 2656 - DNA, 15 bp, synthetic construct
  source 1..15: mol_type = other DNA
aaagatgctctaggc

SEQ ID NO: 2657 - DNA, 15 bp, synthetic construct
  source 1..15: mol_type = other DNA
agacaaaaatcctaa

SEQ ID NO: 2658 - DNA, 15 bp, synthetic construct
  source 1..15: mol_type = other DNA
tctggactggccaat

SEQ ID NO: 2659 - DNA, 15 bp, synthetic construct
  source 1..15: mol_type = other DNA
tacccgccacctctc

SEQ ID NO: 2660 - DNA, 15 bp, synthetic construct
  source 1..15: mol_type = other DNA
tcccaaacccagcag

SEQ ID NO: 2661 - DNA, 15 bp, synthetic construct
  source 1..15: mol_type = other DNA
gatggatcttggcag

SEQ ID NO: 2662 - DNA, 15 bp, synthetic construct
  source 1..15: mol_type = other DNA
tcttgaaactaggaa

SEQ ID NO: 2663 - DNA, 15 bp, synthetic construct
  source 1..15: mol_type = other DNA
agtatgagggaacac

SEQ ID NO: 2664 - DNA, 15 bp, synthetic construct
  source 1..15: mol_type = other DNA
ccagtgcatatgatg

SEQ ID NO: 2665 - DNA, 15 bp, synthetic construct
  source 1..15: mol_type = other DNA
ccctttatcttatct

SEQ ID NO: 2666 - DNA, 15 bp, synthetic construct
  source 1..15: mol_type = other DNA
atgatacaaatttag

SEQ ID NO: 2667 - DNA, 15 bp, synthetic construct
  source 1..15: mol_type = other DNA
cagcctgataatgaa

SEQ ID NO: 2668 - DNA, 15 bp, synthetic construct
  source 1..15: mol_type = other DNA
ctactgtcttgtgag

SEQ ID NO: 2669 - DNA, 15 bp, synthetic construct
  source 1..15: mol_type = other DNA
ggacaaagcaactac

SEQ ID NO: 2670 - DNA, 15 bp, synthetic construct
  source 1..15: mol_type = other DNA
taataagatgtctct

SEQ ID NO: 2671 - DNA, 15 bp, synthetic construct
  source 1..15: mol_type = other DNA
cagtcaacagaaaag

SEQ ID NO: 2672 - DNA, 15 bp, synthetic construct
  source 1..15: mol_type = other DNA
atgctttctctctgc

SEQ ID NO: 2673 - DNA, 15 bp, synthetic construct
  source 1..15: mol_type = other DNA
gttacctaacttatt

SEQ ID NO: 2674 - DNA, 15 bp, synthetic construct
  source 1..15: mol_type = other DNA
tccaaattggtcaca

SEQ ID NO: 2675 - DNA, 15 bp, synthetic construct
  source 1..15: mol_type = other DNA
gcttcttgtcctgta

SEQ ID NO: 2676 - DNA, 15 bp, synthetic construct
  source 1..15: mol_type = other DNA
tggaaatggtattca

SEQ ID NO: 2677 - DNA, 15 bp, synthetic construct
  source 1..15: mol_type = other DNA
gttcctcaaagatca

SEQ ID NO: 2678 - DNA, 15 bp, synthetic construct
  source 1..15: mol_type = other DNA
tgctgctacttcctg

SEQ ID NO: 2679 - DNA, 15 bp, synthetic construct
  source 1..15: mol_type = other DNA
catcaaaacatggag

SEQ ID NO: 2680 - DNA, 15 bp, synthetic construct
  source 1..15: mol_type = other DNA
cgacttccacttgac

SEQ ID NO: 2681 - DNA, 15 bp, synthetic construct
  source 1..15: mol_type = other DNA
atgacagcatggaag

SEQ ID NO: 2682 - DNA, 15 bp, synthetic construct
  source 1..15: mol_type = other DNA
tcttggttatttgcc

SEQ ID NO: 2683 - DNA, 15 bp, synthetic construct
  source 1..15: mol_type = other DNA
tacaagtcaatggca

SEQ ID NO: 2684 - DNA, 15 bp, synthetic construct
  source 1..15: mol_type = other DNA
ccactttggtagtct

SEQ ID NO: 2685 - DNA, 15 bp, synthetic construct
  source 1..15: mol_type = other DNA
tgtgggtatttgtta

SEQ ID NO: 2686 - DNA, 15 bp, synthetic construct
  source 1..15: mol_type = other DNA
aggcactaatctcta

SEQ ID NO: 2687 - DNA, 15 bp, synthetic construct
  source 1..15: mol_type = other DNA
tttaccattctttaa

SEQ ID NO: 2688 - DNA, 15 bp, synthetic construct
  source 1..15: mol_type = other DNA
tgtagtgaaactcct

SEQ ID NO: 2689 - DNA, 15 bp, synthetic construct
  source 1..15: mol_type = other DNA
tgtgttagagatgat

SEQ ID NO: 2690 - DNA, 15 bp, synthetic construct
  source 1..15: mol_type = other DNA
atctcgacagctatt

SEQ ID NO: 2691 - DNA, 15 bp, synthetic construct
  source 1..15: mol_type = other DNA
gatacaaccacggat

SEQ ID NO: 2692 - DNA, 15 bp, synthetic construct
  source 1..15: mol_type = other DNA
ttcttggaactcact

SEQ ID NO: 2693 - DNA, 15 bp, synthetic construct
  source 1..15: mol_type = other DNA
cccttacacgggaat

SEQ ID NO: 2694 - DNA, 15 bp, synthetic construct
  source 1..15: mol_type = other DNA
gaatccatgagctat

SEQ ID NO: 2695 - DNA, 15 bp, synthetic construct
  source 1..15: mol_type = other DNA
tcgtgcaaggcaacc

SEQ ID NO: 2696 - DNA, 15 bp, synthetic construct
  source 1..15: mol_type = other DNA
accattaatttgcct

SEQ ID NO: 2697 - DNA, 15 bp, synthetic construct
  source 1..15: mol_type = other DNA
gtaattgcaaaagac

SEQ ID NO: 2698 - DNA, 15 bp, synthetic construct
  source 1..15: mol_type = other DNA
ttatagtggatgacg

SEQ ID NO: 2699 - DNA, 15 bp, synthetic construct
  source 1..15: mol_type = other DNA
agatgcagatgattc

SEQ ID NO: 2700 - DNA, 15 bp, synthetic construct
  source 1..15: mol_type = other DNA
tagagaggaggactt

SEQ ID NO: 2701 - DNA, 15 bp, synthetic construct
  source 1..15: mol_type = other DNA
caaaacagtatctga

SEQ ID NO: 2702 - DNA, 15 bp, synthetic construct
  source 1..15: mol_type = other DNA
ctcacactctgaact

SEQ ID NO: 2703 - DNA, 15 bp, synthetic construct
  source 1..15: mol_type = other DNA
tcactgttgggcttt

SEQ ID NO: 2704 - DNA, 15 bp, synthetic construct
  source 1..15: mol_type = other DNA
tgaaaagtttccctt

SEQ ID NO: 2705 - DNA, 15 bp, synthetic construct
  source 1..15: mol_type = other DNA
caagctactttacag

SEQ ID NO: 2706 - DNA, 15 bp, synthetic construct
  source 1..15: mol_type = other DNA
acctcgagaagatcg

SEQ ID NO: 2707 - DNA, 15 bp, synthetic construct
  source 1..15: mol_type = other DNA
tgttgattgttggcc

SEQ ID NO: 2708 - DNA, 15 bp, synthetic construct
  source 1..15: mol_type = other DNA
ttgacttttctgata

SEQ ID NO: 2709 - DNA, 15 bp, synthetic construct
  source 1..15: mol_type = other DNA
gtgcacagtaaaaga

SEQ ID NO: 2710 - DNA, 15 bp, synthetic construct
  source 1..15: mol_type = other DNA
ctttggtttatggca

SEQ ID NO: 2711 - DNA, 15 bp, synthetic construct
  source 1..15: mol_type = other DNA
tacacacaccatgac

SEQ ID NO: 2712 - DNA, 15 bp, synthetic construct
  source 1..15: mol_type = other DNA
catgcttttgagcag

SEQ ID NO: 2713 - DNA, 15 bp, synthetic construct
  source 1..15: mol_type = other DNA
cttggttgcagctct

SEQ ID NO: 2714 - DNA, 15 bp, synthetic construct
  source 1..15: mol_type = other DNA
cattggtccagacac

SEQ ID NO: 2715 - DNA, 15 bp, synthetic construct
  source 1..15: mol_type = other DNA
gttaagaccactgca

SEQ ID NO: 2716 - DNA, 15 bp, synthetic construct
  source 1..15: mol_type = other DNA
ctacttcgttagctt

SEQ ID NO: 2717 - DNA, 15 bp, synthetic construct
  source 1..15: mol_type = other DNA
ccggagtaactggtg

SEQ ID NO: 2718 - DNA, 15 bp, synthetic construct
  source 1..15: mol_type = other DNA
cattattgggtaccg

SEQ ID NO: 2719 - DNA, 15 bp, synthetic construct
  source 1..15: mol_type = other DNA
gataccttctcctgc

SEQ ID NO: 2720 - DNA, 15 bp, synthetic construct
  source 1..15: mol_type = other DNA
tttaacattccacca

SEQ ID NO: 2721 - DNA, 15 bp, synthetic construct
  source 1..15: mol_type = other DNA
cactctcaggatagc

SEQ ID NO: 2722 - DNA, 15 bp, synthetic construct
  source 1..15: mol_type = other DNA
cttcccttttctttt

SEQ ID NO: 2723 - DNA, 15 bp, synthetic construct
  source 1..15: mol_type = other DNA
gtaatttgaatccct

SEQ ID NO: 2724 - DNA, 15 bp, synthetic construct
  source 1..15: mol_type = other DNA
agattacacaggtca

SEQ ID NO: 2725 - DNA, 15 bp, synthetic construct
  source 1..15: mol_type = other DNA
gaacctgctactcca

SEQ ID NO: 2726 - DNA, 15 bp, synthetic construct
  source 1..15: mol_type = other DNA
caggagtagaatacg

SEQ ID NO: 2727 - DNA, 15 bp, synthetic construct
  source 1..15: mol_type = other DNA
attggcgcatctctt

SEQ ID NO: 2728 - DNA, 15 bp, synthetic construct
  source 1..15: mol_type = other DNA
ttctgaagagtttac

SEQ ID NO: 2729 - DNA, 15 bp, synthetic construct
  source 1..15: mol_type = other DNA
atggacagaagcagg

SEQ ID NO: 2730 - DNA, 15 bp, synthetic construct
  source 1..15: mol_type = other DNA
gttttgaatatgtgc

SEQ ID NO: 2731 - DNA, 15 bp, synthetic construct
  source 1..15: mol_type = other DNA
gttgcagactagcag

SEQ ID NO: 2732 - DNA, 15 bp, synthetic construct
  source 1..15: mol_type = other DNA
agtacaccgtatccc

SEQ ID NO: 2733 - DNA, 15 bp, synthetic construct
  source 1..15: mol_type = other DNA
taaagactccagtgg

SEQ ID NO: 2734 - DNA, 15 bp, synthetic construct
  source 1..15: mol_type = other DNA
atgctcccactaacc

SEQ ID NO: 2735 - DNA, 15 bp, synthetic construct
  source 1..15: mol_type = other DNA
ggtatcctgttatct

SEQ ID NO: 2736 - DNA, 15 bp, synthetic construct
  source 1..15: mol_type = other DNA
ctcaatctcttactg

SEQ ID NO: 2737 - DNA, 15 bp, synthetic construct
  source 1..15: mol_type = other DNA
acacctctgagtgaa

SEQ ID NO: 2738 - DNA, 15 bp, synthetic construct
  source 1..15: mol_type = other DNA
gtgatccccgtcaac

SEQ ID NO: 2739 - DNA, 15 bp, synthetic construct
  source 1..15: mol_type = other DNA
aagactttgaagtaa

SEQ ID NO: 2740 - DNA, 15 bp, synthetic construct
  source 1..15: mol_type = other DNA
tgaatgaccagttga

SEQ ID NO: 2741 - DNA, 15 bp, synthetic construct
  source 1..15: mol_type = other DNA
ccttcaggaacaatc

SEQ ID NO: 2742 - DNA, 15 bp, synthetic construct
  source 1..15: mol_type = other DNA
agggtacagaatagt

SEQ ID NO: 2743 - DNA, 15 bp, synthetic construct
  source 1..15: mol_type = other DNA
gattttcttccacag

SEQ ID NO: 2744 - DNA, 15 bp, synthetic construct
  source 1..15: mol_type = other DNA
cactaatcaagcaag

SEQ ID NO: 2745 - DNA, 15 bp, synthetic construct
  source 1..15: mol_type = other DNA
gtcattaagattaac

SEQ ID NO: 2746 - DNA, 15 bp, synthetic construct
  source 1..15: mol_type = other DNA
caaacaacaggtaca

SEQ ID NO: 2747 - DNA, 15 bp, synthetic construct
  source 1..15: mol_type = other DNA
aggaagtgctactac

SEQ ID NO: 2748 - DNA, 15 bp, synthetic construct
  source 1..15: mol_type = other DNA
ctagtttgctctgat

SEQ ID NO: 2749 - DNA, 15 bp, synthetic construct
  source 1..15: mol_type = other DNA
cttgagcgacatatt

SEQ ID NO: 2750 - DNA, 15 bp, synthetic construct
  source 1..15: mol_type = other DNA
gacggtaaattttct

SEQ ID NO: 2751 - DNA, 15 bp, synthetic construct
  source 1..15: mol_type = other DNA
aaatttaccgtcctc

SEQ ID NO: 2752 - DNA, 15 bp, synthetic construct
  source 1..15: mol_type = other DNA
ctggtgtggtatacg

SEQ ID NO: 2753 - DNA, 15 bp, synthetic construct
  source 1..15: mol_type = other DNA
gtacatactggtcac

SEQ ID NO: 2754 - DNA, 15 bp, synthetic construct
  source 1..15: mol_type = other DNA
catccttgtaaacac

SEQ ID NO: 2755 - DNA, 15 bp, synthetic construct
  source 1..15: mol_type = other DNA
cagagttgttggctc

SEQ ID NO: 2756 - DNA, 15 bp, synthetic construct
  source 1..15: mol_type = other DNA
attttcaggctcaag

SEQ ID NO: 2757 - DNA, 15 bp, synthetic construct
  source 1..15: mol_type = other DNA
tatccaaggtttctg

SEQ ID NO: 2758 - DNA, 15 bp, synthetic construct
  source 1..15: mol_type = other DNA
cgacaagcaaagctg

SEQ ID NO: 2759 - DNA, 15 bp, synthetic construct
  source 1..15: mol_type = other DNA
tggcagttctcaact

SEQ ID NO: 2760 - DNA, 15 bp, synthetic construct
  source 1..15: mol_type = other DNA
tagcaccctgaaatt

SEQ ID NO: 2761 - DNA, 15 bp, synthetic construct
  source 1..15: mol_type = other DNA
cagtcatgtgatttc

SEQ ID NO: 2762 - DNA, 15 bp, synthetic construct
  source 1..15: mol_type = other DNA
ctcactcacccacct

SEQ ID NO: 2763 - DNA, 15 bp, synthetic construct
  source 1..15: mol_type = other DNA
cttttgccatctcaa

SEQ ID NO: 2764 - DNA, 15 bp, synthetic construct
  source 1..15: mol_type = other DNA
tacatgtttagacct

SEQ ID NO: 2765 - DNA, 15 bp, synthetic construct
  source 1..15: mol_type = other DNA
attgttgtcaaacaa

SEQ ID NO: 2766 - DNA, 15 bp, synthetic construct
  source 1..15: mol_type = other DNA
ttccttctttgttgt

SEQ ID NO: 2767 - DNA, 15 bp, synthetic construct
  source 1..15: mol_type = other DNA
actgaacaaaagcga

SEQ ID NO: 2768 - DNA, 15 bp, synthetic construct
  source 1..15: mol_type = other DNA
cttaccattcaccta

SEQ ID NO: 2769 - DNA, 15 bp, synthetic construct
  source 1..15: mol_type = other DNA
gcagaaagagtattt

SEQ ID NO: 2770 - DNA, 15 bp, synthetic construct
  source 1..15: mol_type = other DNA
agtatctcattgaag

SEQ ID NO: 2771 - DNA, 15 bp, synthetic construct
  source 1..15: mol_type = other DNA
ccatgaccagaaaga

SEQ ID NO: 2772 - DNA, 15 bp, synthetic construct
  source 1..15: mol_type = other DNA
ataagcaaatgcttt

SEQ ID NO: 2773 - DNA, 15 bp, synthetic construct
  source 1..15: mol_type = other DNA
acctgtctcttggca

SEQ ID NO: 2774 - DNA, 15 bp, synthetic construct
  source 1..15: mol_type = other DNA
gaaagtagtgaattg

SEQ ID NO: 2775 - DNA, 15 bp, synthetic construct
  source 1..15: mol_type = other DNA
acctgcttccccatt

SEQ ID NO: 2776 - DNA, 15 bp, synthetic construct
  source 1..15: mol_type = other DNA
ccacttgcgactctc

SEQ ID NO: 2777 - DNA, 15 bp, synthetic construct
  source 1..15: mol_type = other DNA
ggaatccagaaaaca

SEQ ID NO: 2778 - DNA, 15 bp, synthetic construct
  source 1..15: mol_type = other DNA
gagcttgcacaattc

SEQ ID NO: 2779 - DNA, 15 bp, synthetic construct
  source 1..15: mol_type = other DNA
acattagaactaagc

SEQ ID NO: 2780 - DNA, 15 bp, synthetic construct
  source 1..15: mol_type = other DNA
tgggtggaatatgag

SEQ ID NO: 2781 - DNA, 15 bp, synthetic construct
  source 1..15: mol_type = other DNA
aacagaaaatgacag

SEQ ID NO: 2782 - DNA, 15 bp, synthetic construct
  source 1..15: mol_type = other DNA
ctcacatggactttc

SEQ ID NO: 2783 - DNA, 15 bp, synthetic construct
  source 1..15: mol_type = other DNA
ttaccacttcatgta

SEQ ID NO: 2784 - DNA, 15 bp, synthetic construct
  source 1..15: mol_type = other DNA
gaaaaggagaaatgc

SEQ ID NO: 2785 - DNA, 15 bp, synthetic construct
  source 1..15: mol_type = other DNA
cagccccaactttgg

SEQ ID NO: 2786 - DNA, 15 bp, synthetic construct
  source 1..15: mol_type = other DNA
ctcaacatgcttagg

SEQ ID NO: 2787 - DNA, 15 bp, synthetic construct
  source 1..15: mol_type = other DNA
cacgcttgctttgac

SEQ ID NO: 2788 - DNA, 15 bp, synthetic construct
  source 1..15: mol_type = other DNA
ttagaagggattttt

SEQ ID NO: 2789 - DNA, 15 bp, synthetic construct
  source 1..15: mol_type = other DNA
tcctgcataagcatt

SEQ ID NO: 2790 - DNA, 15 bp, synthetic construct
  source 1..15: mol_type = other DNA
ttctgttgcttgaaa

SEQ ID NO: 2791 - DNA, 15 bp, synthetic construct
  source 1..15: mol_type = other DNA
aagggagtcttgtaa

SEQ ID NO: 2792 - DNA, 15 bp, synthetic construct
  source 1..15: mol_type = other DNA
ataactcaagagctg

SEQ ID NO: 2793 - DNA, 15 bp, synthetic construct
  source 1..15: mol_type = other DNA
ctctcactggaatct

SEQ ID NO: 2794 - DNA, 15 bp, synthetic construct
  source 1..15: mol_type = other DNA
gttctgccccgaagg

SEQ ID NO: 2795 - DNA, 15 bp, synthetic construct
  source 1..15: mol_type = other DNA
gatgctaagttagag

SEQ ID NO: 2796 - DNA, 15 bp, synthetic construct
  source 1..15: mol_type = other DNA
aacactgcaatgagt

SEQ ID NO: 2797 - DNA, 15 bp, synthetic construct
  source 1..15: mol_type = other DNA
ccaggtgttgattgg

SEQ ID NO: 2798 - DNA, 15 bp, synthetic construct
  source 1..15: mol_type = other DNA
ttggcagctgtttaa

SEQ ID NO: 2799 - DNA, 15 bp, synthetic construct
  source 1..15: mol_type = other DNA
aagcttgtgttgagt

SEQ ID NO: 2800 - DNA, 15 bp, synthetic construct
  source 1..15: mol_type = other DNA
atgcactccataagc

SEQ ID NO: 2801 - DNA, 15 bp, synthetic construct
  source 1..15: mol_type = other DNA
agccacatcatagtc

SEQ ID NO: 2802 - DNA, 15 bp, synthetic construct
  source 1..15: mol_type = other DNA
taaggtcctgtgaat

SEQ ID NO: 2803 - DNA, 15 bp, synthetic construct
  source 1..15: mol_type = other DNA
tccctttcatttgtc

SEQ ID NO: 2804 - DNA, 15 bp, synthetic construct
  source 1..15: mol_type = other DNA
ggaagaggagcagaa

SEQ ID NO: 2805 - DNA, 15 bp, synthetic construct
  source 1..15: mol_type = other DNA
gtgatcacgtagcag

SEQ ID NO: 2806 - DNA, 15 bp, synthetic construct
  source 1..15: mol_type = other DNA
ctcacctttacttac

SEQ ID NO: 2807 - DNA, 15 bp, synthetic construct
  source 1..15: mol_type = other DNA
atatgcttctgttct

SEQ ID NO: 2808 - DNA, 15 bp, synthetic construct
  source 1..15: mol_type = other DNA
tttgagcaacagagg

SEQ ID NO: 2809 - DNA, 15 bp, synthetic construct
  source 1..15: mol_type = other DNA
gcctatgtacctttc

SEQ ID NO: 2810 - DNA, 15 bp, synthetic construct
  source 1..15: mol_type = other DNA
cttccggtaaaaggc

SEQ ID NO: 2811 - DNA, 15 bp, synthetic construct
  source 1..15: mol_type = other DNA
gccatagccaaagga

SEQ ID NO: 2812 - DNA, 15 bp, synthetic construct
  source 1..15: mol_type = other DNA
aaccattattttatg

SEQ ID NO: 2813 - DNA, 15 bp, synthetic construct
  source 1..15: mol_type = other DNA
aaggtagaggtgatg

SEQ ID NO: 2814 - DNA, 15 bp, synthetic construct
  source 1..15: mol_type = other DNA
acttgctaagaaggt

SEQ ID NO: 2815 - DNA, 15 bp, synthetic construct
  source 1..15: mol_type = other DNA
atcaacgtcgtggtg

SEQ ID NO: 2816 - DNA, 15 bp, synthetic construct
  source 1..15: mol_type = other DNA
ataaagacagtgatt

SEQ ID NO: 2817 - DNA, 15 bp, synthetic construct
  source 1..15: mol_type = other DNA
cttgaatgagaaagt

SEQ ID NO: 2818 - DNA, 15 bp, synthetic construct
  source 1..15: mol_type = other DNA
gagcaaaatattatg

SEQ ID NO: 2819 - DNA, 15 bp, synthetic construct
  source 1..15: mol_type = other DNA
agaaaaggagatgcc

SEQ ID NO: 2820 - DNA, 15 bp, synthetic construct
  source 1..15: mol_type = other DNA
cttgactgcgatgat

SEQ ID NO: 2821 - DNA, 15 bp, synthetic construct
  source 1..15: mol_type = other DNA
tgtttgtcttttagg

SEQ ID NO: 2822 - DNA, 15 bp, synthetic construct
  source 1..15: mol_type = other DNA
tctgaccatatcatg

SEQ ID NO: 2823 - DNA, 15 bp, synthetic construct
  source 1..15: mol_type = other DNA
ttctgagctaagcca

SEQ ID NO: 2824 - DNA, 15 bp, synthetic construct
  source 1..15: mol_type = other DNA
caccactatcttgcg

SEQ ID NO: 2825 - DNA, 15 bp, synthetic construct
  source 1..15: mol_type = other DNA
ggttcctccaacctg

SEQ ID NO: 2826 - DNA, 15 bp, synthetic construct
  source 1..15: mol_type = other DNA
catggaaaggaacac

SEQ ID NO: 2827 - DNA, 15 bp, synthetic construct
  source 1..15: mol_type = other DNA
gttgagatttgtaaa

SEQ ID NO: 2828 - DNA, 15 bp, synthetic construct
  source 1..15: mol_type = other DNA
agagagagagaggtc

SEQ ID NO: 2829 - DNA, 15 bp, synthetic construct
  source 1..15: mol_type = other DNA
gtgaaaactgttgat

SEQ ID NO: 2830 - DNA, 15 bp, synthetic construct
  source 1..15: mol_type = other DNA
tggtgaatttcaaag

SEQ ID NO: 2831 - DNA, 15 bp, synthetic construct
  source 1..15: mol_type = other DNA
gagtataagcagtca

SEQ ID NO: 2832 - DNA, 15 bp, synthetic construct
  source 1..15: mol_type = other DNA
acagttggaactgct

SEQ ID NO: 2833 - DNA, 15 bp, synthetic construct
  source 1..15: mol_type = other DNA
atccgcatcgatggc

SEQ ID NO: 2834 - DNA, 15 bp, synthetic construct
  source 1..15: mol_type = other DNA
ctgagtcttctgcgt

SEQ ID NO: 2835 - DNA, 15 bp, synthetic construct
  source 1..15: mol_type = other DNA
atggtggatggaact

SEQ ID NO: 2836 - DNA, 15 bp, synthetic construct
  source 1..15: mol_type = other DNA
agcaaaagcagaagc

SEQ ID NO: 2837 - DNA, 15 bp, synthetic construct
  source 1..15: mol_type = other DNA
tcattagtctggtgg

SEQ ID NO: 2838 - DNA, 15 bp, synthetic construct
  source 1..15: mol_type = other DNA
taggagtgattcaca

SEQ ID NO: 2839 - DNA, 15 bp, synthetic construct
  source 1..15: mol_type = other DNA
aatgagcacagagag

SEQ ID NO: 2840 - DNA, 15 bp, synthetic construct
  source 1..15: mol_type = other DNA
ggaataggtcgtaga

SEQ ID NO: 2841 - DNA, 15 bp, synthetic construct
  source 1..15: mol_type = other DNA
tgatgaaggacccaa

SEQ ID NO: 2842 - DNA, 15 bp, synthetic construct
  source 1..15: mol_type = other DNA
aagctgtcccagtta

SEQ ID NO: 2843 - DNA, 15 bp, synthetic construct
  source 1..15: mol_type = other DNA
acatctggaagtagt

SEQ ID NO: 2844 - DNA, 15 bp, synthetic construct
  source 1..15: mol_type = other DNA
gctcaaaaagtttta

SEQ ID NO: 2845 - DNA, 15 bp, synthetic construct
  source 1..15: mol_type = other DNA
aggacaaaatgggat

SEQ ID NO: 2846 - DNA, 15 bp, synthetic construct
  source 1..15: mol_type = other DNA
gagccagaataaagt

SEQ ID NO: 2847 - DNA, 15 bp, synthetic construct
  source 1..15: mol_type = other DNA
ttccctttcaagatg

SEQ ID NO: 2848 - DNA, 15 bp, synthetic construct
  source 1..15: mol_type = other DNA
agtctcgacactgag

SEQ ID NO: 2849 - DNA, 15 bp, synthetic construct
  source 1..15: mol_type = other DNA
cactggaagtccctg

SEQ ID NO: 2850 - DNA, 15 bp, synthetic construct
  source 1..15: mol_type = other DNA
aaactgagtgagtga

SEQ ID NO: 2851 - DNA, 15 bp, synthetic construct
  source 1..15: mol_type = other DNA
aatgatgggagctgg

SEQ ID NO: 2852 - DNA, 15 bp, synthetic construct
  source 1..15: mol_type = other DNA
caaatgtccccatcc

SEQ ID NO: 2853 - DNA, 15 bp, synthetic construct
  source 1..15: mol_type = other DNA
acctaattgaagaat

SEQ ID NO: 2854 - DNA, 15 bp, synthetic construct
  source 1..15: mol_type = other DNA
tcagtgtaccacttg

SEQ ID NO: 2855 - DNA, 15 bp, synthetic construct
  source 1..15: mol_type = other DNA
agaccgtgatgtaca

SEQ ID NO: 2856 - DNA, 15 bp, synthetic construct
  source 1..15: mol_type = other DNA
agagctttatatcac

SEQ ID NO: 2857 - DNA, 15 bp, synthetic construct
  source 1..15: mol_type = other DNA
ttcccagagattaag

SEQ ID NO: 2858 - DNA, 15 bp, synthetic construct
  source 1..15: mol_type = other DNA
caaaggcttcgtttt

SEQ ID NO: 2859 - DNA, 15 bp, synthetic construct
  source 1..15: mol_type = other DNA
gggtgtgaggtagaa

SEQ ID NO: 2860 - DNA, 15 bp, synthetic construct
  source 1..15: mol_type = other DNA
tcctccaggagtacc

SEQ ID NO: 2861 - DNA, 15 bp, synthetic construct
  source 1..15: mol_type = other DNA
tgaccgactcaacca

SEQ ID NO: 2862 - DNA, 15 bp, synthetic construct
  source 1..15: mol_type = other DNA
tagcatgccccacta

SEQ ID NO: 2863 - DNA, 15 bp, synthetic construct
  source 1..15: mol_type = other DNA
ctcatgcttccttat

SEQ ID NO: 2864 - DNA, 15 bp, synthetic construct
  source 1..15: mol_type = other DNA
cacccaacagagatg

SEQ ID NO: 2865 - DNA, 15 bp, synthetic construct
  source 1..15: mol_type = other DNA
tgggtgctagtgtga

SEQ ID NO: 2866 - DNA, 15 bp, synthetic construct
  source 1..15: mol_type = other DNA
agggtcatttttata

SEQ ID NO: 2867 - DNA, 15 bp, synthetic construct
  source 1..15: mol_type = other DNA
gagctacaaaccaga

SEQ ID NO: 2868 - DNA, 15 bp, synthetic construct
  source 1..15: mol_type = other DNA
tgtggttgcctgact

SEQ ID NO: 2869 - DNA, 15 bp, synthetic construct
  source 1..15: mol_type = other DNA
cgaagagtacagtcc

SEQ ID NO: 2870 - DNA, 15 bp, synthetic construct
  source 1..15: mol_type = other DNA
aaatgacatatcagt

SEQ ID NO: 2871 - DNA, 15 bp, synthetic construct
  source 1..15: mol_type = other DNA
atttggatgtatcac

SEQ ID NO: 2872 - DNA, 15 bp, synthetic construct
  source 1..15: mol_type = other DNA
aaacatgagatagaa

SEQ ID NO: 2873 - DNA, 15 bp, synthetic construct
  source 1..15: mol_type = other DNA
cgctactagaacatt

SEQ ID NO: 2874 - DNA, 15 bp, synthetic construct
  source 1..15: mol_type = other DNA
attggtttttatctg

SEQ ID NO: 2875 - DNA, 15 bp, synthetic construct
  source 1..15: mol_type = other DNA
cagcaccagaaaagg

SEQ ID NO: 2876 - DNA, 15 bp, synthetic construct
  source 1..15: mol_type = other DNA
gttagagccctacag

SEQ ID NO: 2877 - DNA, 15 bp, synthetic construct
  source 1..15: mol_type = other DNA
tcttgactctgtgta

SEQ ID NO: 2878 - DNA, 15 bp, synthetic construct
  source 1..15: mol_type = other DNA
ggtcagtttacttgc

SEQ ID NO: 2879 - DNA, 15 bp, synthetic construct
  source 1..15: mol_type = other DNA
agaaacaacacagtt

SEQ ID NO: 2880 - DNA, 15 bp, synthetic construct
  source 1..15: mol_type = other DNA
atgattgtgtctttg

SEQ ID NO: 2881 - DNA, 15 bp, synthetic construct
  source 1..15: mol_type = other DNA
taaatcacacatcag

SEQ ID NO: 2882 - DNA, 15 bp, synthetic construct
  source 1..15: mol_type = other DNA
atgtttaagggatgt

SEQ ID NO: 2883 - DNA, 15 bp, synthetic construct
  source 1..15: mol_type = other DNA
tgctccttttgatca

SEQ ID NO: 2884 - DNA, 15 bp, synthetic construct
  source 1..15: mol_type = other DNA
tggtgttgatcttac

SEQ ID NO: 2885 - DNA, 15 bp, synthetic construct
  source 1..15: mol_type = other DNA
tcaaaagcatgtctt

SEQ ID NO: 2886 - DNA, 15 bp, synthetic construct
  source 1..15: mol_type = other DNA
ggagctaactgcttt

SEQ ID NO: 2887 - DNA, 15 bp, synthetic construct
  source 1..15: mol_type = other DNA
gcaatgtgaaggaaa

SEQ ID NO: 2888 - DNA, 15 bp, synthetic construct
  source 1..15: mol_type = other DNA
tgtcagttcacgtca

SEQ ID NO: 2889 - DNA, 15 bp, synthetic construct
  source 1..15: mol_type = other DNA
ttgagatgctcatat

SEQ ID NO: 2890 - DNA, 15 bp, synthetic construct
  source 1..15: mol_type = other DNA
aagaatctgggaatt

SEQ ID NO: 2891 - DNA, 15 bp, synthetic construct
  source 1..15: mol_type = other DNA
actctatttcatcta

SEQ ID NO: 2892 - DNA, 15 bp, synthetic construct
  source 1..15: mol_type = other DNA
tgcttttgtagaact

SEQ ID NO: 2893 - DNA, 15 bp, synthetic construct
  source 1..15: mol_type = other DNA
aagtatttcaaacaa

SEQ ID NO: 2894 - DNA, 15 bp, synthetic construct
  source 1..15: mol_type = other DNA
tgcgggtgactttga

SEQ ID NO: 2895 - DNA, 15 bp, synthetic construct
  source 1..15: mol_type = other DNA
ctttttcagcttatc

SEQ ID NO: 2896 - DNA, 15 bp, synthetic construct
  source 1..15: mol_type = other DNA
aaacatacatggtca

SEQ ID NO: 2897 - DNA, 15 bp, synthetic construct
  source 1..15: mol_type = other DNA
atcataaacacagag

SEQ ID NO: 2898 - DNA, 15 bp, synthetic construct
  source 1..15: mol_type = other DNA
tgaacagagattcgt

SEQ ID NO: 2899 - DNA, 15 bp, synthetic construct
  source 1..15: mol_type = other DNA
aacttcttgaaagct

SEQ ID NO: 2900 - DNA, 15 bp, synthetic construct
  source 1..15: mol_type = other DNA
acgagtgatgcactg

SEQ ID NO: 2901 - DNA, 15 bp, synthetic construct
  source 1..15: mol_type = other DNA
gcccagaattctcca

SEQ ID NO: 2902 - DNA, 15 bp, synthetic construct
  source 1..15: mol_type = other DNA
agcaaaaacactctt

SEQ ID NO: 2903 - DNA, 15 bp, synthetic construct
  source 1..15: mol_type = other DNA
tagtgtgctgatggg

SEQ ID NO: 2904 - DNA, 15 bp, synthetic construct
  source 1..15: mol_type = other DNA
gcgcaataagaaatg

SEQ ID NO: 2905 - DNA, 15 bp, synthetic construct
  source 1..15: mol_type = other DNA
tcttcatagactgat

SEQ ID NO: 2906 - DNA, 15 bp, synthetic construct
  source 1..15: mol_type = other DNA
gatatgctttccaac

SEQ ID NO: 2907 - DNA, 15 bp, synthetic construct
  source 1..15: mol_type = other DNA
gattttcccaatgtg

SEQ ID NO: 2908 - DNA, 15 bp, synthetic construct
  source 1..15: mol_type = other DNA
acgtctacaatttgg

SEQ ID NO: 2909 - DNA, 15 bp, synthetic construct
  source 1..15: mol_type = other DNA
acttctcctttccgc

SEQ ID NO: 2910 - DNA, 15 bp, synthetic construct
  source 1..15: mol_type = other DNA
tgattgcttttggaa

SEQ ID NO: 2911 - DNA, 15 bp, synthetic construct
  source 1..15: mol_type = other DNA
tgcttaaaggaagaa

SEQ ID NO: 2912 - DNA, 15 bp, synthetic construct
  source 1..15: mol_type = other DNA
atgcctgtatatacg

SEQ ID NO: 2913 - DNA, 15 bp, synthetic construct
  source 1..15: mol_type = other DNA
acctttaaaaagaac

SEQ ID NO: 2914 - DNA, 15 bp, synthetic construct
  source 1..15: mol_type = other DNA
aaaatgcaattcaag

SEQ ID NO: 2915 - DNA, 15 bp, synthetic construct
  source 1..15: mol_type = other DNA
caaaactaagaccac

SEQ ID NO: 2916 - DNA, 15 bp, synthetic construct
  source 1..15: mol_type = other DNA
ataggttgttaatgt

SEQ ID NO: 2917 - DNA, 15 bp, synthetic construct
  source 1..15: mol_type = other DNA
tttgaaaggatgtca

SEQ ID NO: 2918 - DNA, 15 bp, synthetic construct
  source 1..15: mol_type = other DNA
gtcattctgaattgc

SEQ ID NO: 2919 - DNA, 15 bp, synthetic construct
  source 1..15: mol_type = other DNA
cgcgtgcggctctcg

SEQ ID NO: 2920 - DNA, 15 bp, synthetic construct
  source 1..15: mol_type = other DNA
ccagcgtcgccccta

SEQ ID NO: 2921 - DNA, 15 bp, synthetic construct
  source 1..15: mol_type = other DNA
aagggagtccaaaat

SEQ ID NO: 2922 - DNA, 15 bp, synthetic construct
  source 1..15: mol_type = other DNA
tagcttctggctcac

SEQ ID NO: 2923 - DNA, 15 bp, synthetic construct
  source 1..15: mol_type = other DNA
cttttaaggtgtctg

SEQ ID NO: 2924 - DNA, 15 bp, synthetic construct
  source 1..15: mol_type = other DNA
tctgagccctaattc

SEQ ID NO: 2925 - DNA, 15 bp, synthetic construct
  source 1..15: mol_type = other DNA
ttaggaaatggtgaa

SEQ ID NO: 2926 - DNA, 15 bp, synthetic construct
  source 1..15: mol_type = other DNA
acgacagatcctact

SEQ ID NO: 2927 - DNA, 15 bp, synthetic construct
  source 1..15: mol_type = other DNA
cctcttcagagagtg

SEQ ID NO: 2928 - DNA, 15 bp, synthetic construct
  source 1..15: mol_type = other DNA
ttcagaacacgtatc

SEQ ID NO: 2929 - DNA, 15 bp, synthetic construct
  source 1..15: mol_type = other DNA
gagcttctttgacac

SEQ ID NO: 2930 - DNA, 15 bp, synthetic construct
  source 1..15: mol_type = other DNA
gggtatagtctgtta

SEQ ID NO: 2931 - DNA, 15 bp, synthetic construct
  source 1..15: mol_type = other DNA
ggtcttgattgtgag

SEQ ID NO: 2932 - DNA, 15 bp, synthetic construct
  source 1..15: mol_type = other DNA
gaggtgcttaacata

SEQ ID NO: 2933 - DNA, 15 bp, synthetic construct
  source 1..15: mol_type = other DNA
ggtcttgattgtgag

SEQ ID NO: 2934 - DNA, 15 bp, synthetic construct
  source 1..15: mol_type = other DNA
gaggtgcttaacata

SEQ ID NO: 2935 - DNA, 15 bp, synthetic construct
  source 1..15: mol_type = other DNA
gaggtgcttaacata

SEQ ID NO: 2936 - DNA, 15 bp, synthetic construct
  source 1..15: mol_type = other DNA
atcagagattttgta

SEQ ID NO: 2937 - DNA, 15 bp, synthetic construct
  source 1..15: mol_type = other DNA
cggtataagcacggt

SEQ ID NO: 2938 - DNA, 15 bp, synthetic construct
  source 1..15: mol_type = other DNA
acacaagcggtgatt

SEQ ID NO: 2939 - DNA, 15 bp, synthetic construct
  source 1..15: mol_type = other DNA
cagaagtatgaaaca

SEQ ID NO: 2940 - DNA, 15 bp, synthetic construct
  source 1..15: mol_type = other DNA
aaagtcactgcttct

SEQ ID NO: 2941 - DNA, 15 bp, synthetic construct
  source 1..15: mol_type = other DNA
tgtatgtaggttgga

SEQ ID NO: 2942 - DNA, 15 bp, synthetic construct
  source 1..15: mol_type = other DNA
ttgttggagtgaatc

SEQ ID NO: 2943 - DNA, 15 bp, synthetic construct
  source 1..15: mol_type = other DNA
taagataaccaagtt

SEQ ID NO: 2944 - DNA, 15 bp, synthetic construct
  source 1..15: mol_type = other DNA
cattcgtctttgact

SEQ ID NO: 2945 - DNA, 15 bp, synthetic construct
  source 1..15: mol_type = other DNA
ctattctgccactct

SEQ ID NO: 2946 - DNA, 15 bp, synthetic construct
  source 1..15: mol_type = other DNA
ccttccaaatgcaat

SEQ ID NO: 2947 - DNA, 15 bp, synthetic construct
  source 1..15: mol_type = other DNA
ttgcatttggaaggt

SEQ ID NO: 2948 - DNA, 15 bp, synthetic construct
  source 1..15: mol_type = other DNA
tcaggcactataaca

SEQ ID NO: 2949 - DNA, 15 bp, synthetic construct
  source 1..15: mol_type = other DNA
aatctcatgaagtgc

SEQ ID NO: 2950 - DNA, 15 bp, synthetic construct
  source 1..15: mol_type = other DNA
ctagagtgagtaccg

SEQ ID NO: 2951 - DNA, 15 bp, synthetic construct
  source 1..15: mol_type = other DNA
agagtggtataacca

SEQ ID NO: 2952 - DNA, 15 bp, synthetic construct
  source 1..15: mol_type = other DNA
ccatctgcaaaactt

SEQ ID NO: 2953 - DNA, 15 bp, synthetic construct
  source 1..15: mol_type = other DNA
gtttctgaaacactc

SEQ ID NO: 2954 - DNA, 15 bp, synthetic construct
  source 1..15: mol_type = other DNA
tagggtgggctgaac

SEQ ID NO: 2955 - DNA, 15 bp, synthetic construct
  source 1..15: mol_type = other DNA
attgccagctagaag

SEQ ID NO: 2956 - DNA, 15 bp, synthetic construct
  source 1..15: mol_type = other DNA
accaaattaaattgt

SEQ ID NO: 2957 - DNA, 15 bp, synthetic construct
  source 1..15: mol_type = other DNA
gtaaaaggcacttgt

SEQ ID NO: 2958 - DNA, 15 bp, synthetic construct
  source 1..15: mol_type = other DNA
attacaaaaaccaaa

SEQ ID NO: 2959 - DNA, 15 bp, synthetic construct
  source 1..15: mol_type = other DNA
cttcccccacaaagc

SEQ ID NO: 2960 - DNA, 15 bp, synthetic construct
  source 1..15: mol_type = other DNA
cagcagagacctgta

SEQ ID NO: 2961 - DNA, 15 bp, synthetic construct
  source 1..15: mol_type = other DNA
taacaaatgtgatct

SEQ ID NO: 2962 - DNA, 15 bp, synthetic construct
  source 1..15: mol_type = other DNA
tgggagtgaaatgta

SEQ ID NO: 2963 - DNA, 15 bp, synthetic construct
  source 1..15: mol_type = other DNA
ataccagaaacaaat

SEQ ID NO: 2964 - DNA, 15 bp, synthetic construct
  source 1..15: mol_type = other DNA
cccacccctgaaaaa

SEQ ID NO: 2965 - DNA, 15 bp, synthetic construct
  source 1..15: mol_type = other DNA
atttcatgtttctaa

SEQ ID NO: 2966 - DNA, 15 bp, synthetic construct
  source 1..15: mol_type = other DNA
ctgtggtttgtctta

SEQ ID NO: 2967 - DNA, 15 bp, synthetic construct
  source 1..15: mol_type = other DNA
aaaaagcactaccta

SEQ ID NO: 2968 - DNA, 15 bp, synthetic construct
  source 1..15: mol_type = other DNA
ttcctgctgtgtgtg

SEQ ID NO: 2969 - DNA, 15 bp, synthetic construct
  source 1..15: mol_type = other DNA
cataaaagagtaaaa

SEQ ID NO: 2970 - DNA, 15 bp, synthetic construct
  source 1..15: mol_type = other DNA
tcctaggtctcaaag

SEQ ID NO: 2971 - DNA, 15 bp, synthetic construct
  source 1..15: mol_type = other DNA
acttacctgggctac

SEQ ID NO: 2972 - DNA, 15 bp, synthetic construct
  source 1..15: mol_type = other DNA
aacaattcatcatgg

SEQ ID NO: 2973 - DNA, 15 bp, synthetic construct
  source 1..15: mol_type = other DNA
agccagctctatgca

SEQ ID NO: 2974 - DNA, 15 bp, synthetic construct
  source 1..15: mol_type = other DNA
ttcgtggtgacatgg

SEQ ID NO: 2975 - DNA, 15 bp, synthetic construct
  source 1..15: mol_type = other DNA
attcactcctggtga

SEQ ID NO: 2976 - DNA, 15 bp, synthetic construct
  source 1..15: mol_type = other DNA
aaaaggtggcaaaac

SEQ ID NO: 2977 - DNA, 15 bp, synthetic construct
  source 1..15: mol_type = other DNA
ccatttcctcaatga

SEQ ID NO: 2978 - DNA, 15 bp, synthetic construct
  source 1..15: mol_type = other DNA
ttattgagtctgtgt

SEQ ID NO: 2979 - DNA, 15 bp, synthetic construct
  source 1..15: mol_type = other DNA
aaaacttcagaaatg

SEQ ID NO: 2980 - DNA, 15 bp, synthetic construct
  source 1..15: mol_type = other DNA
gagacagactcacat

SEQ ID NO: 2981 - DNA, 15 bp, synthetic construct
  source 1..15: mol_type = other DNA
ttgtaccccaaagct

SEQ ID NO: 2982 - DNA, 15 bp, synthetic construct
  source 1..15: mol_type = other DNA
tgacataacattccc

SEQ ID NO: 2983 - DNA, 15 bp, synthetic construct
  source 1..15: mol_type = other DNA
ctgacccttcaagcc

SEQ ID NO: 2984 - DNA, 15 bp, synthetic construct
  source 1..15: mol_type = other DNA
tacaatgactgcttt

SEQ ID NO: 2985 - DNA, 15 bp, synthetic construct
  source 1..15: mol_type = other DNA
ttggcaaatagagaa

SEQ ID NO: 2986 - DNA, 15 bp, synthetic construct
  source 1..15: mol_type = other DNA
atcctactttaccct

SEQ ID NO: 2987 - DNA, 15 bp, synthetic construct
  source 1..15: mol_type = other DNA
tccatacatcattca

SEQ ID NO: 2988 - DNA, 15 bp, synthetic construct
  source 1..15: mol_type = other DNA
agaatgccaagctag

SEQ ID NO: 2989 - DNA, 15 bp, synthetic construct
  source 1..15: mol_type = other DNA
ccatctgtaaagccc

SEQ ID NO: 2990 - DNA, 15 bp, synthetic construct
  source 1..15: mol_type = other DNA
caggtgctggggata

SEQ ID NO: 2991 - DNA, 15 bp, synthetic construct
  source 1..15: mol_type = other DNA
actggtaagaggtac

SEQ ID NO: 2992 - DNA, 15 bp, synthetic construct
  source 1..15: mol_type = other DNA
taaagcccttattgg

SEQ ID NO: 2993 - DNA, 15 bp, synthetic construct
  source 1..15: mol_type = other DNA
ccacattacacatct

SEQ ID NO: 2994 - DNA, 15 bp, synthetic construct
  source 1..15: mol_type = other DNA
gcaaaagtcacttat

SEQ ID NO: 2995 - DNA, 15 bp, synthetic construct
  source 1..15: mol_type = other DNA
atgctaatggatatg

SEQ ID NO: 2996 - DNA, 15 bp, synthetic construct
  source 1..15: mol_type = other DNA
ttactctgagagtat

SEQ ID NO: 2997 - DNA, 15 bp, synthetic construct
  source 1..15: mol_type = other DNA
tgattccaatatcag

SEQ ID NO: 2998 - DNA, 15 bp, synthetic construct
  source 1..15: mol_type = other DNA
tgtttattctcatgt

SEQ ID NO: 2999 - DNA, 15 bp, synthetic construct
  source 1..15: mol_type = other DNA
tatggaaatactggg

SEQ ID NO: 3000 - DNA, 15 bp, synthetic construct
  source 1..15: mol_type = other DNA
tgtgcacatgatcgt

SEQ ID NO: 3001 - DNA, 15 bp, synthetic construct
  source 1..15: mol_type = other DNA
ttcctggcaatactt

SEQ ID NO: 3002 - DNA, 15 bp, synthetic construct
  source 1..15: mol_type = other DNA
ctttgcatggtctca

SEQ ID NO: 3003 - DNA, 15 bp, synthetic construct
  source 1..15: mol_type = other DNA
taattactgtgtttg

SEQ ID NO: 3004 - DNA, 15 bp, synthetic construct
  source 1..15: mol_type = other DNA
ggaccaaatatccat

SEQ ID NO: 3005 - DNA, 15 bp, synthetic construct
  source 1..15: mol_type = other DNA
ctgggatatttagat

SEQ ID NO: 3006 - DNA, 15 bp, synthetic construct
  source 1..15: mol_type = other DNA
cctctaaatgttgtc

SEQ ID NO: 3007 - DNA, 15 bp, synthetic construct
  source 1..15: mol_type = other DNA
tgataaagaccatga

SEQ ID NO: 3008 - DNA, 15 bp, synthetic construct
  source 1..15: mol_type = other DNA
aggagatggaattca

SEQ ID NO: 3009 - DNA, 15 bp, synthetic construct
  source 1..15: mol_type = other DNA
atactttgctgccac

SEQ ID NO: 3010 - DNA, 15 bp, synthetic construct
  source 1..15: mol_type = other DNA
taggattggaagcat

SEQ ID NO: 3011 - DNA, 15 bp, synthetic construct
  source 1..15: mol_type = other DNA
gccataaaattgggc

SEQ ID NO: 3012 - DNA, 15 bp, synthetic construct
  source 1..15: mol_type = other DNA
atatattgtgtagcc

SEQ ID NO: 3013 - DNA, 15 bp, synthetic construct
  source 1..15: mol_type = other DNA
ttctgacaaatatca

SEQ ID NO: 3014 - DNA, 15 bp, synthetic construct
  source 1..15: mol_type = other DNA
tccatgatagaaact

SEQ ID NO: 3015 - DNA, 15 bp, synthetic construct
  source 1..15: mol_type = other DNA
caaacggcccacctg

SEQ ID NO: 3016 - DNA, 15 bp, synthetic construct
  source 1..15: mol_type = other DNA
atccacatgggatca

SEQ ID NO: 3017 - DNA, 15 bp, synthetic construct
  source 1..15: mol_type = other DNA
ttgcactaggtgagc

SEQ ID NO: 3018 - DNA, 15 bp, synthetic construct
  source 1..15: mol_type = other DNA
cagttagatgagtcc

SEQ ID NO: 3019 - DNA, 15 bp, synthetic construct
  source 1..15: mol_type = other DNA
cgactaaagccactg

SEQ ID NO: 3020 - DNA, 15 bp, synthetic construct
  source 1..15: mol_type = other DNA
tttcagggccatcct

SEQ ID NO: 3021 - DNA, 15 bp, synthetic construct
  source 1..15: mol_type = other DNA
tttaacggcacctaa

SEQ ID NO: 3022 - DNA, 15 bp, synthetic construct
  source 1..15: mol_type = other DNA
gtgataataatatgg

SEQ ID NO: 3023 - DNA, 15 bp, synthetic construct
  source 1..15: mol_type = other DNA
acttaagattcctgt

SEQ ID NO: 3024 - DNA, 15 bp, synthetic construct
  source 1..15: mol_type = other DNA
atcacaattgccata

SEQ ID NO: 3025 - DNA, 15 bp, synthetic construct
  source 1..15: mol_type = other DNA
agtacttctgccttt

SEQ ID NO: 3026 - DNA, 15 bp, synthetic construct
  source 1..15: mol_type = other DNA
tcagcatgtttaaag

SEQ ID NO: 3027 - DNA, 15 bp, synthetic construct
  source 1..15: mol_type = other DNA
ggtgagtctttcatg

SEQ ID NO: 3028 - DNA, 15 bp, synthetic construct
  source 1..15: mol_type = other DNA
gaatgagtatatgtt

SEQ ID NO: 3029 - DNA, 15 bp, synthetic construct
  source 1..15: mol_type = other DNA
tgccaagaatctggg

SEQ ID NO: 3030 - DNA, 15 bp, synthetic construct
  source 1..15: mol_type = other DNA
caagagtgcttgtta

SEQ ID NO: 3031 - DNA, 15 bp, synthetic construct
  source 1..15: mol_type = other DNA
tcccagagggtgatt

SEQ ID NO: 3032 - DNA, 15 bp, synthetic construct
  source 1..15: mol_type = other DNA
agcagcctcatagaa

SEQ ID NO: 3033 - DNA, 15 bp, synthetic construct
  source 1..15: mol_type = other DNA
tcccagagggtgatt

SEQ ID NO: 3034 - DNA, 15 bp, synthetic construct
  source 1..15: mol_type = other DNA
agcagcctcatagaa

SEQ ID NO: 3035 - DNA, 15 bp, synthetic construct
  source 1..15: mol_type = other DNA
ctggaatgatttggc

SEQ ID NO: 3036 - DNA, 15 bp, synthetic construct
  source 1..15: mol_type = other DNA
tcaacaagaaccttc

SEQ ID NO: 3037 - DNA, 15 bp, synthetic construct
  source 1..15: mol_type = other DNA
ggtccccggactcgc

SEQ ID NO: 3038 - DNA, 15 bp, synthetic construct
  source 1..15: mol_type = other DNA
ggacctgcgtgaagc

SEQ ID NO: 3039 - DNA, 15 bp, synthetic construct
  source 1..15: mol_type = other DNA
atactcgaagaacag

SEQ ID NO: 3040 - DNA, 15 bp, synthetic construct
  source 1..15: mol_type = other DNA
catactgcggatctt

SEQ ID NO: 3041 - DNA, 15 bp, synthetic construct
  source 1..15: mol_type = other DNA
gtttattgtgggata

SEQ ID NO: 3042 - DNA, 15 bp, synthetic construct
  source 1..15: mol_type = other DNA
ctaagatgtggaatt

SEQ ID NO: 3043 - DNA, 15 bp, synthetic construct
  source 1..15: mol_type = other DNA
gggtttcttagtgcc

SEQ ID NO: 3044 - DNA, 15 bp, synthetic construct
  source 1..15: mol_type = other DNA
atctaccattacaga

SEQ ID NO: 3045 - DNA, 15 bp, synthetic construct
  source 1..15: mol_type = other DNA
tcctttttcctatgt

SEQ ID NO: 3046 - DNA, 15 bp, synthetic construct
  source 1..15: mol_type = other DNA
caggaagtacatttt

SEQ ID NO: 3047 - DNA, 15 bp, synthetic construct
  source 1..15: mol_type = other DNA
gtgcatcttttccct

SEQ ID NO: 3048 - DNA, 15 bp, synthetic construct
  source 1..15: mol_type = other DNA
ctggcctaaaggaat

SEQ ID NO: 3049 - DNA, 15 bp, synthetic construct
  source 1..15: mol_type = other DNA
ctagatttaccattg

SEQ ID NO: 3050 - DNA, 15 bp, synthetic construct
  source 1..15: mol_type = other DNA
aagtcatgacggatt

SEQ ID NO: 3051 - DNA, 15 bp, synthetic construct
  source 1..15: mol_type = other DNA
gtgcgtttgatattc

SEQ ID NO: 3052 - DNA, 15 bp, synthetic construct
  source 1..15: mol_type = other DNA
ctatttaataggaat

SEQ ID NO: 3053 - DNA, 15 bp, synthetic construct
  source 1..15: mol_type = other DNA
actgtaaatttttga

SEQ ID NO: 3054 - DNA, 15 bp, synthetic construct
  source 1..15: mol_type = other DNA
gcatcaagttctata

SEQ ID NO: 3055 - DNA, 15 bp, synthetic construct
  source 1..15: mol_type = other DNA
tttcaagggtgctcc

SEQ ID NO: 3056 - DNA, 15 bp, synthetic construct
  source 1..15: mol_type = other DNA
gaggccagacatgta

SEQ ID NO: 3057 - DNA, 15 bp, synthetic construct
  source 1..15: mol_type = other DNA
ttttgatgtttgtta

SEQ ID NO: 3058 - DNA, 15 bp, synthetic construct
  source 1..15: mol_type = other DNA
agagtctgtagcaag

SEQ ID NO: 3059 - DNA, 15 bp, synthetic construct
  source 1..15: mol_type = other DNA
ttggatgcatttcct

SEQ ID NO: 3060 - DNA, 15 bp, synthetic construct
  source 1..15: mol_type = other DNA
tgcaaggagaaaaga

SEQ ID NO: 3061 - DNA, 15 bp, synthetic construct
  source 1..15: mol_type = other DNA
tattggaactttgat

SEQ ID NO: 3062 - DNA, 15 bp, synthetic construct
  source 1..15: mol_type = other DNA
tgcttatacgggaag

SEQ ID NO: 3063 - DNA, 15 bp, synthetic construct
  source 1..15: mol_type = other DNA
taagcactaaagggg

SEQ ID NO: 3064 - DNA, 15 bp, synthetic construct
  source 1..15: mol_type = other DNA
gtaaaagaggtgcag

SEQ ID NO: 3065 - DNA, 15 bp, synthetic construct
  source 1..15: mol_type = other DNA
ggtgtattgggttgt

SEQ ID NO: 3066 - DNA, 15 bp, synthetic construct
  source 1..15: mol_type = other DNA
tttatgtgttatggg

SEQ ID NO: 3067 - DNA, 15 bp, synthetic construct
  source 1..15: mol_type = other DNA
gatggctcagcactg

SEQ ID NO: 3068 - DNA, 15 bp, synthetic construct
  source 1..15: mol_type = other DNA
tgtaacctaaagagt

SEQ ID NO: 3069 - DNA, 15 bp, synthetic construct
  source 1..15: mol_type = other DNA
aggagatgatcatat

SEQ ID NO: 3070 - DNA, 15 bp, synthetic construct
  source 1..15: mol_type = other DNA
tttaaaagctgtaag

SEQ ID NO: 3071 - DNA, 15 bp, synthetic construct
  source 1..15: mol_type = other DNA
ctgtgaagagagatc

SEQ ID NO: 3072 - DNA, 15 bp, synthetic construct
  source 1..15: mol_type = other DNA
ttaggtccagggttg

SEQ ID NO: 3073 - DNA, 15 bp, synthetic construct
  source 1..15: mol_type = other DNA
ggaaaataatttaaa

SEQ ID NO: 3074 - DNA, 15 bp, synthetic construct
  source 1..15: mol_type = other DNA
gaacttgatcaaaca

SEQ ID NO: 3075 - DNA, 15 bp, synthetic construct
  source 1..15: mol_type = other DNA
gaaactgaagtaatg

SEQ ID NO: 3076 - DNA, 15 bp, synthetic construct
  source 1..15: mol_type = other DNA
gtcaattccataagc

SEQ ID NO: 3077 - DNA, 15 bp, synthetic construct
  source 1..15: mol_type = other DNA
agattccaaaagtgg

SEQ ID NO: 3078 - DNA, 15 bp, synthetic construct
  source 1..15: mol_type = other DNA
aacacttctagatca

SEQ ID NO: 3079 - DNA, 15 bp, synthetic construct
  source 1..15: mol_type = other DNA
cctctccattgtgca

SEQ ID NO: 3080 - DNA, 15 bp, synthetic construct
  source 1..15: mol_type = other DNA
gaagacctggtgaac

SEQ ID NO: 3081 - DNA, 15 bp, synthetic construct
  source 1..15: mol_type = other DNA
aggatcatcaaggcc

SEQ ID NO: 3082 - DNA, 15 bp, synthetic construct
  source 1..15: mol_type = other DNA
cacatctgtcatttg

SEQ ID NO: 3083 - DNA, 15 bp, synthetic construct
  source 1..15: mol_type = other DNA
aatacaaagatgaga

SEQ ID NO: 3084 - DNA, 15 bp, synthetic construct
  source 1..15: mol_type = other DNA
acgatgaaaaaggct

SEQ ID NO: 3085 - DNA, 15 bp, synthetic construct
  source 1..15: mol_type = other DNA
ggactcaatgtagct

SEQ ID NO: 3086 - DNA, 15 bp, synthetic construct
  source 1..15: mol_type = other DNA
ccaccaatccaatgc

SEQ ID NO: 3087 - DNA, 15 bp, synthetic construct
  source 1..15: mol_type = other DNA
tctttccccacaagg

SEQ ID NO: 3088 - DNA, 15 bp, synthetic construct
  source 1..15: mol_type = other DNA
gtgtgttgcaaccat

SEQ ID NO: 3089 - DNA, 15 bp, synthetic construct
  source 1..15: mol_type = other DNA
aagagtgtgttgaaa

SEQ ID NO: 3090 - DNA, 15 bp, synthetic construct
  source 1..15: mol_type = other DNA
gaattccatccaagc

SEQ ID NO: 3091 - DNA, 15 bp, synthetic construct
  source 1..15: mol_type = other DNA
gtgaaacacttcagc

SEQ ID NO: 3092 - DNA, 15 bp, synthetic construct
  source 1..15: mol_type = other DNA
ttagagtgatgaact

SEQ ID NO: 3093 - DNA, 15 bp, synthetic construct
  source 1..15: mol_type = other DNA
agcacgattcaaaca

SEQ ID NO: 3094 - DNA, 15 bp, synthetic construct
  source 1..15: mol_type = other DNA
aaccatcaacccact

SEQ ID NO: 3095 - DNA, 15 bp, synthetic construct
  source 1..15: mol_type = other DNA
agacaagcttcaata

SEQ ID NO: 3096 - DNA, 15 bp, synthetic construct
  source 1..15: mol_type = other DNA
ccaatgaatacattt

SEQ ID NO: 3097 - DNA, 15 bp, synthetic construct
  source 1..15: mol_type = other DNA
aaaagggataggacg

SEQ ID NO: 3098 - DNA, 15 bp, synthetic construct
  source 1..15: mol_type = other DNA
ctggaattcctggtt

SEQ ID NO: 3099 - DNA, 15 bp, synthetic construct
  source 1..15: mol_type = other DNA
agatcctggtcttcc

SEQ ID NO: 3100 - DNA, 15 bp, synthetic construct
  source 1..15: mol_type = other DNA
acattttaaagagta

SEQ ID NO: 3101 - DNA, 15 bp, synthetic construct
  source 1..15: mol_type = other DNA
taagagagttactgc

SEQ ID NO: 3102 - DNA, 15 bp, synthetic construct
  source 1..15: mol_type = other DNA
ctctgccagataagt

SEQ ID NO: 3103 - DNA, 15 bp, synthetic construct
  source 1..15: mol_type = other DNA
ccataacagagagtc

SEQ ID NO: 3104 - DNA, 15 bp, synthetic construct
  source 1..15: mol_type = other DNA
gagaaaagtaatgac

SEQ ID NO: 3105 - DNA, 15 bp, synthetic construct
  source 1..15: mol_type = other DNA
ccataacagagagtc

SEQ ID NO: 3106 - DNA, 15 bp, synthetic construct
  source 1..15: mol_type = other DNA
gagaaaagtaatgac

SEQ ID NO: 3107 - DNA, 15 bp, synthetic construct
  source 1..15: mol_type = other DNA
taccaagaccttaag

SEQ ID NO: 3108 - DNA, 15 bp, synthetic construct
  source 1..15: mol_type = other DNA
tcccatgttaagcag

SEQ ID NO: 3109 - DNA, 15 bp, synthetic construct
  source 1..15: mol_type = other DNA
gttaattaattcatt

SEQ ID NO: 3110 - DNA, 15 bp, synthetic construct
  source 1..15: mol_type = other DNA
aagaagaagaaataa

SEQ ID NO: 3111 - DNA, 15 bp, synthetic construct
  source 1..15: mol_type = other DNA
actctgtacaacacg

SEQ ID NO: 3112 - DNA, 15 bp, synthetic construct
  source 1..15: mol_type = other DNA
tgttgctctctcaga

SEQ ID NO: 3113 - DNA, 15 bp, synthetic construct
  source 1..15: mol_type = other DNA
aattaaggacctgat

SEQ ID NO: 3114 - DNA, 15 bp, synthetic construct
  source 1..15: mol_type = other DNA
accaaacggatttgc

SEQ ID NO: 3115 - DNA, 15 bp, synthetic construct
  source 1..15: mol_type = other DNA
ttcttgttaatacct

SEQ ID NO: 3116 - DNA, 15 bp, synthetic construct
  source 1..15: mol_type = other DNA
actatcagaacagaa

SEQ ID NO: 3117 - DNA, 15 bp, synthetic construct
  source 1..15: mol_type = other DNA
agggcaataactact

SEQ ID NO: 3118 - DNA, 15 bp, synthetic construct
  source 1..15: mol_type = other DNA
ccaagtggaaaacca

SEQ ID NO: 3119 - DNA, 15 bp, synthetic construct
  source 1..15: mol_type = other DNA
cttcaagatcctcat

SEQ ID NO: 3120 - DNA, 15 bp, synthetic construct
  source 1..15: mol_type = other DNA
ttcaaggcactcact

SEQ ID NO: 3121 - DNA, 15 bp, synthetic construct
  source 1..15: mol_type = other DNA
ccacatatcctgctt

SEQ ID NO: 3122 - DNA, 15 bp, synthetic construct
  source 1..15: mol_type = other DNA
cacaatgatttcagg

SEQ ID NO: 3123 - DNA, 15 bp, synthetic construct
  source 1..15: mol_type = other DNA
tcactgttgtaatca

SEQ ID NO: 3124 - DNA, 15 bp, synthetic construct
  source 1..15: mol_type = other DNA
taactaggagctacc

SEQ ID NO: 3125 - DNA, 15 bp, synthetic construct
  source 1..15: mol_type = other DNA
gcaagaaataaatcc

SEQ ID NO: 3126 - DNA, 15 bp, synthetic construct
  source 1..15: mol_type = other DNA
ttagagcagcaaagg

SEQ ID NO: 3127 - DNA, 15 bp, synthetic construct
  source 1..15: mol_type = other DNA
cctttgctgctctaa

SEQ ID NO: 3128 - DNA, 15 bp, synthetic construct
  source 1..15: mol_type = other DNA
tgctttctctccttg

SEQ ID NO: 3129 - DNA, 15 bp, synthetic construct
  source 1..15: mol_type = other DNA
actctaacccaagca

SEQ ID NO: 3130 - DNA, 15 bp, synthetic construct
  source 1..15: mol_type = other DNA
tgggcttcctcttga

SEQ ID NO: 3131 - DNA, 15 bp, synthetic construct
  source 1..15: mol_type = other DNA
ggcatagaaggattc

SEQ ID NO: 3132 - DNA, 15 bp, synthetic construct
  source 1..15: mol_type = other DNA
gaaccacaggtagtg

SEQ ID NO: 3133 - DNA, 15 bp, synthetic construct
  source 1..15: mol_type = other DNA
tgtggcaatgctaag

SEQ ID NO: 3134 - DNA, 15 bp, synthetic construct
  source 1..15: mol_type = other DNA
ctcaccagacgacct

SEQ ID NO: 3135 - DNA, 15 bp, synthetic construct
  source 1..15: mol_type = other DNA
acttttcatgaattc

SEQ ID NO: 3136 - DNA, 15 bp, synthetic construct
  source 1..15: mol_type = other DNA
agttaacatcaacaa

SEQ ID NO: 3137 - DNA, 15 bp, synthetic construct
  source 1..15: mol_type = other DNA
agcttattctcaccc

SEQ ID NO: 3138 - DNA, 15 bp, synthetic construct
  source 1..15: mol_type = other DNA
tgccctaaaatatga

SEQ ID NO: 3139 - DNA, 15 bp, synthetic construct
  source 1..15: mol_type = other DNA
tagtatttgtcctta

SEQ ID NO: 3140 - DNA, 15 bp, synthetic construct
  source 1..15: mol_type = other DNA
cacctgttgacataa

SEQ ID NO: 3141 - DNA, 15 bp, synthetic construct
  source 1..15: mol_type = other DNA
tagtatttgtcctta

SEQ ID NO: 3142 - DNA, 15 bp, synthetic construct
  source 1..15: mol_type = other DNA
cacctgttgacataa

SEQ ID NO: 3143 - DNA, 15 bp, synthetic construct
  source 1..15: mol_type = other DNA
tgaagaaaggtaaca

SEQ ID NO: 3144 - DNA, 15 bp, synthetic construct
  source 1..15: mol_type = other DNA
cagtttacaggtatt

SEQ ID NO: 3145 - DNA, 15 bp, synthetic construct
  source 1..15: mol_type = other DNA
tgaagaaaggtaaca

SEQ ID NO: 3146 - DNA, 15 bp, synthetic construct
  source 1..15: mol_type = other DNA
cagtttacaggtatt

SEQ ID NO: 3147 - DNA, 15 bp, synthetic construct
  source 1..15: mol_type = other DNA
acttttcatcctata

SEQ ID NO: 3148 - DNA, 15 bp, synthetic construct
  source 1..15: mol_type = other DNA
aaactcaaaggccta

SEQ ID NO: 3149 - DNA, 15 bp, synthetic construct
  source 1..15: mol_type = other DNA
atttttataagccac

SEQ ID NO: 3150 - DNA, 15 bp, synthetic construct
  source 1..15: mol_type = other DNA
acaaagcctctcgtt

SEQ ID NO: 3151 - DNA, 15 bp, synthetic construct
  source 1..15: mol_type = other DNA
gccaggtttgaaagg

SEQ ID NO: 3152 - DNA, 15 bp, synthetic construct
  source 1..15: mol_type = other DNA
taggctataaagatt

SEQ ID NO: 3153 - DNA, 15 bp, synthetic construct
  source 1..15: mol_type = other DNA
atggctcactgcagc

SEQ ID NO: 3154 - DNA, 15 bp, synthetic construct
  source 1..15: mol_type = other DNA
agcactttgggaggc

SEQ ID NO: 3155 - DNA, 15 bp, synthetic construct
  source 1..15: mol_type = other DNA
tgggagaaagaagat

SEQ ID NO: 3156 - DNA, 15 bp, synthetic construct
  source 1..15: mol_type = other DNA
aatggcattgtggta

SEQ ID NO: 3157 - DNA, 15 bp, synthetic construct
  source 1..15: mol_type = other DNA
tgggagaaagaagat

SEQ ID NO: 3158 - DNA, 15 bp, synthetic construct
  source 1..15: mol_type = other DNA
aatggcattgtggta

SEQ ID NO: 3159 - DNA, 15 bp, synthetic construct
  source 1..15: mol_type = other DNA
attaggaactcttgg

SEQ ID NO: 3160 - DNA, 15 bp, synthetic construct
  source 1..15: mol_type = other DNA
ctttcattccattac

SEQ ID NO: 3161 - DNA, 15 bp, synthetic construct
  source 1..15: mol_type = other DNA
aatgggaccaagtga

SEQ ID NO: 3162 - DNA, 15 bp, synthetic construct
  source 1..15: mol_type = other DNA
ctttaccctaaacct

SEQ ID NO: 3163 - DNA, 15 bp, synthetic construct
  source 1..15: mol_type = other DNA
cagagtgtttattca

SEQ ID NO: 3164 - DNA, 15 bp, synthetic construct
  source 1..15: mol_type = other DNA
ctgcaattgagtcat

SEQ ID NO: 3165 - DNA, 15 bp, synthetic construct
  source 1..15: mol_type = other DNA
aataaatttcaaaat

SEQ ID NO: 3166 - DNA, 15 bp, synthetic construct
  source 1..15: mol_type = other DNA
tcattactttgttct

SEQ ID NO: 3167 - DNA, 15 bp, synthetic construct
  source 1..15: mol_type = other DNA
ctttttgtagtttca

SEQ ID NO: 3168 - DNA, 15 bp, synthetic construct
  source 1..15: mol_type = other DNA
agatctgtttctctg

SEQ ID NO: 3169 - DNA, 15 bp, synthetic construct
  source 1..15: mol_type = other DNA
atcctttggctgttt

SEQ ID NO: 3170 - DNA, 15 bp, synthetic construct
  source 1..15: mol_type = other DNA
tcctgaattatctac

SEQ ID NO: 3171 - DNA, 15 bp, synthetic construct
  source 1..15: mol_type = other DNA
acaacgaggtatgta

SEQ ID NO: 3172 - DNA, 15 bp, synthetic construct
  source 1..15: mol_type = other DNA
ccttaacacaccact

SEQ ID NO: 3173 - DNA, 15 bp, synthetic construct
  source 1..15: mol_type = other DNA
actgggcattgatct

SEQ ID NO: 3174 - DNA, 15 bp, synthetic construct
  source 1..15: mol_type = other DNA
ccacaatgtcaccca

SEQ ID NO: 3175 - DNA, 15 bp, synthetic construct
  source 1..15: mol_type = other DNA
cttgatgatgctatt

SEQ ID NO: 3176 - DNA, 15 bp, synthetic construct
  source 1..15: mol_type = other DNA
ttaatgaggcaacct

SEQ ID NO: 3177 - DNA, 15 bp, synthetic construct
  source 1..15: mol_type = other DNA
agttgcttagctatt

SEQ ID NO: 3178 - DNA, 15 bp, synthetic construct
  source 1..15: mol_type = other DNA
cttactacttcaaac

SEQ ID NO: 3179 - DNA, 15 bp, synthetic construct
  source 1..15: mol_type = other DNA
gttacaaagcactat

SEQ ID NO: 3180 - DNA, 15 bp, synthetic construct
  source 1..15: mol_type = other DNA
ttgaggtatgtcact

SEQ ID NO: 3181 - DNA, 15 bp, synthetic construct
  source 1..15: mol_type = other DNA
aaatcttgcagcagc

SEQ ID NO: 3182 - DNA, 15 bp, synthetic construct
  source 1..15: mol_type = other DNA
gccatatcaacatag

SEQ ID NO: 3183 - DNA, 15 bp, synthetic construct
  source 1..15: mol_type = other DNA
tgccatcaccagatg

SEQ ID NO: 3184 - DNA, 15 bp, synthetic construct
  source 1..15: mol_type = other DNA
agccagcttaaatgc

SEQ ID NO: 3185 - DNA, 15 bp, synthetic construct
  source 1..15: mol_type = other DNA
acatctgttgattcc

SEQ ID NO: 3186 - DNA, 15 bp, synthetic construct
  source 1..15: mol_type = other DNA
gctctagctcaaagg

SEQ ID NO: 3187 - DNA, 15 bp, synthetic construct
  source 1..15: mol_type = other DNA
aggtgtaataaacat

SEQ ID NO: 3188 - DNA, 15 bp, synthetic construct
  source 1..15: mol_type = other DNA
ataagcaaggtagcc

SEQ ID NO: 3189 - DNA, 15 bp, synthetic construct
  source 1..15: mol_type = other DNA
catctaaaacacacc

SEQ ID NO: 3190 - DNA, 15 bp, synthetic construct
  source 1..15: mol_type = other DNA
aagcttcccccatct

SEQ ID NO: 3191 - DNA, 15 bp, synthetic construct
  source 1..15: mol_type = other DNA
tccgtgttcttaacc

SEQ ID NO: 3192 - DNA, 15 bp, synthetic construct
  source 1..15: mol_type = other DNA
aacaaactgaggaag

SEQ ID NO: 3193 - DNA, 15 bp, synthetic construct
  source 1..15: mol_type = other DNA
ggttttgtagcatac

SEQ ID NO: 3194 - DNA, 15 bp, synthetic construct
  source 1..15: mol_type = other DNA
catgggaattttaac

SEQ ID NO: 3195 - DNA, 15 bp, synthetic construct
  source 1..15: mol_type = other DNA
tttcctcttatatga

SEQ ID NO: 3196 - DNA, 15 bp, synthetic construct
  source 1..15: mol_type = other DNA
ccccttcttgcacta

SEQ ID NO: 3197 - DNA, 15 bp, synthetic construct
  source 1..15: mol_type = other DNA
tctacctgacctaaa

SEQ ID NO: 3198 - DNA, 15 bp, synthetic construct
  source 1..15: mol_type = other DNA
aaatacagcaaccat

SEQ ID NO: 3199 - DNA, 15 bp, synthetic construct
  source 1..15: mol_type = other DNA
ttgatatagagttgt

SEQ ID NO: 3200 - DNA, 15 bp, synthetic construct
  source 1..15: mol_type = other DNA
gtttggaacggatct

SEQ ID NO: 3201 - DNA, 15 bp, synthetic construct
  source 1..15: mol_type = other DNA
tctccccaaaacatt

SEQ ID NO: 3202 - DNA, 15 bp, synthetic construct
  source 1..15: mol_type = other DNA
ggcaaatgtgaataa

SEQ ID NO: 3203 - DNA, 15 bp, synthetic construct
  source 1..15: mol_type = other DNA
atgatgactttgatg

SEQ ID NO: 3204 - DNA, 15 bp, synthetic construct
  source 1..15: mol_type = other DNA
taacttgtcaaggca

SEQ ID NO: 3205 - DNA, 15 bp, synthetic construct
  source 1..15: mol_type = other DNA
gctacacattctggg

SEQ ID NO: 3206 - DNA, 15 bp, synthetic construct
  source 1..15: mol_type = other DNA
aaacacgaaatccat

SEQ ID NO: 3207 - DNA, 15 bp, synthetic construct
  source 1..15: mol_type = other DNA
gcttgacttctaggt

SEQ ID NO: 3208 - DNA, 15 bp, synthetic construct
  source 1..15: mol_type = other DNA
agtcaattcccgctt

SEQ ID NO: 3209 - DNA, 15 bp, synthetic construct
  source 1..15: mol_type = other DNA
tgccgtttttcatgt

SEQ ID NO: 3210 - DNA, 15 bp, synthetic construct
  source 1..15: mol_type = other DNA
ttgcgtaggttctag

SEQ ID NO: 3211 - DNA, 15 bp, synthetic construct
  source 1..15: mol_type = other DNA
gaactttctctcctc

SEQ ID NO: 3212 - DNA, 15 bp, synthetic construct
  source 1..15: mol_type = other DNA
gaggccttgtgatat

SEQ ID NO: 3213 - DNA, 15 bp, synthetic construct
  source 1..15: mol_type = other DNA
gttgcacgttttgtt

SEQ ID NO: 3214 - DNA, 15 bp, synthetic construct
  source 1..15: mol_type = other DNA
caaaatgcccttccc

SEQ ID NO: 3215 - DNA, 15 bp, synthetic construct
  source 1..15: mol_type = other DNA
gccggctgaaagagg

SEQ ID NO: 3216 - DNA, 15 bp, synthetic construct
  source 1..15: mol_type = other DNA
agtcttgtggacaac

SEQ ID NO: 3217 - DNA, 15 bp, synthetic construct
  source 1..15: mol_type = other DNA
ctcttcttggtttca

SEQ ID NO: 3218 - DNA, 15 bp, synthetic construct
  source 1..15: mol_type = other DNA
cagtcctaaaagaca

SEQ ID NO: 3219 - DNA, 15 bp, synthetic construct
  source 1..15: mol_type = other DNA
aggaaagagttgatt

SEQ ID NO: 3220 - DNA, 15 bp, synthetic construct
  source 1..15: mol_type = other DNA
gagaatagccttcca

SEQ ID NO: 3221 - DNA, 15 bp, synthetic construct
  source 1..15: mol_type = other DNA
cgtggaaaaatcgta

SEQ ID NO: 3222 - DNA, 15 bp, synthetic construct
  source 1..15: mol_type = other DNA
gaaggcttcatgaaa

SEQ ID NO: 3223 - DNA, 15 bp, synthetic construct
  source 1..15: mol_type = other DNA
gaattaatccaaaga

SEQ ID NO: 3224 - DNA, 15 bp, synthetic construct
  source 1..15: mol_type = other DNA
ttggcatgcgatttt

SEQ ID NO: 3225 - DNA, 15 bp, synthetic construct
  source 1..15: mol_type = other DNA
agcaggcaatctgtt

SEQ ID NO: 3226 - DNA, 15 bp, synthetic construct
  source 1..15: mol_type = other DNA
ccagtttatgatgcc

SEQ ID NO: 3227 - DNA, 15 bp, synthetic construct
  source 1..15: mol_type = other DNA
tgatttagcagaatt

SEQ ID NO: 3228 - DNA, 15 bp, synthetic construct
  source 1..15: mol_type = other DNA
ttaacaccatcaacc

SEQ ID NO: 3229 - DNA, 15 bp, synthetic construct
  source 1..15: mol_type = other DNA
gcgtatgaatcagat

SEQ ID NO: 3230 - DNA, 15 bp, synthetic construct
  source 1..15: mol_type = other DNA
tccaatacttaatca

SEQ ID NO: 3231 - DNA, 15 bp, synthetic construct
  source 1..15: mol_type = other DNA
gatatgcatctggtt

SEQ ID NO: 3232 - DNA, 15 bp, synthetic construct
  source 1..15: mol_type = other DNA
acagtcctgactgaa

SEQ ID NO: 3233 - DNA, 15 bp, synthetic construct
  source 1..15: mol_type = other DNA
gaaaaactgctggtt

SEQ ID NO: 3234 - DNA, 15 bp, synthetic construct
  source 1..15: mol_type = other DNA
aggcacataaattct

SEQ ID NO: 3235 - DNA, 15 bp, synthetic construct
  source 1..15: mol_type = other DNA
ctcttggctgataag

SEQ ID NO: 3236 - DNA, 15 bp, synthetic construct
  source 1..15: mol_type = other DNA
cctaaactgagttct

SEQ ID NO: 3237 - DNA, 15 bp, synthetic construct
  source 1..15: mol_type = other DNA
ttgtttgctaaccca

SEQ ID NO: 3238 - DNA, 15 bp, synthetic construct
  source 1..15: mol_type = other DNA
gggagatatacgttc

SEQ ID NO: 3239 - DNA, 15 bp, synthetic construct
  source 1..15: mol_type = other DNA
ccctaacagagcaca

SEQ ID NO: 3240 - DNA, 15 bp, synthetic construct
  source 1..15: mol_type = other DNA
aagatgctatagaaa

SEQ ID NO: 3241 - DNA, 15 bp, synthetic construct
  source 1..15: mol_type = other DNA
gatagtccttctcgt

SEQ ID NO: 3242 - DNA, 15 bp, synthetic construct
  source 1..15: mol_type = other DNA
tccggagaacatgta

SEQ ID NO: 3243 - DNA, 15 bp, synthetic construct
  source 1..15: mol_type = other DNA
gctgttcaccaaaac

SEQ ID NO: 3244 - DNA, 15 bp, synthetic construct
  source 1..15: mol_type = other DNA
catggaacagaaaag

SEQ ID NO: 3245 - DNA, 15 bp, synthetic construct
  source 1..15: mol_type = other DNA
taatctgtccatctt

SEQ ID NO: 3246 - DNA, 15 bp, synthetic construct
  source 1..15: mol_type = other DNA
tgatccaaacgaagt

SEQ ID NO: 3247 - DNA, 15 bp, synthetic construct
  source 1..15: mol_type = other DNA
aaacttagctacgag

SEQ ID NO: 3248 - DNA, 15 bp, synthetic construct
  source 1..15: mol_type = other DNA
aaatctgttggctac

SEQ ID NO: 3249 - DNA, 15 bp, synthetic construct
  source 1..15: mol_type = other DNA
catgctgcctaaaac

SEQ ID NO: 3250 - DNA, 15 bp, synthetic construct
  source 1..15: mol_type = other DNA
cttcctgacaaccac

SEQ ID NO: 3251 - DNA, 15 bp, synthetic construct
  source 1..15: mol_type = other DNA
tgagatgaggtagct

SEQ ID NO: 3252 - DNA, 15 bp, synthetic construct
  source 1..15: mol_type = other DNA
gagcatccttgtttg

SEQ ID NO: 3253 - DNA, 15 bp, synthetic construct
  source 1..15: mol_type = other DNA
agttcatgctcttgg

SEQ ID NO: 3254 - DNA, 15 bp, synthetic construct
  source 1..15: mol_type = other DNA
caggtctttctcttc

SEQ ID NO: 3255 - DNA, 15 bp, synthetic construct
  source 1..15: mol_type = other DNA
ctcagcggatgacag

SEQ ID NO: 3256 - DNA, 15 bp, synthetic construct
  source 1..15: mol_type = other DNA
tgcacgtggaggtca

SEQ ID NO: 3257 - DNA, 15 bp, synthetic construct
  source 1..15: mol_type = other DNA
ctgtccacacatcgc

SEQ ID NO: 3258 - DNA, 15 bp, synthetic construct
  source 1..15: mol_type = other DNA
attgagcgcgtagtg

SEQ ID NO: 3259 - DNA, 15 bp, synthetic construct
  source 1..15: mol_type = other DNA
ctgtacttctgctcg

SEQ ID NO: 3260 - DNA, 15 bp, synthetic construct
  source 1..15: mol_type = other DNA
cacggcagaatggtc

SEQ ID NO: 3261 - DNA, 15 bp, synthetic construct
  source 1..15: mol_type = other DNA
tcccccagccatagc

SEQ ID NO: 3262 - DNA, 15 bp, synthetic construct
  source 1..15: mol_type = other DNA
tcctggtgagcaggt

SEQ ID NO: 3263 - DNA, 15 bp, synthetic construct
  source 1..15: mol_type = other DNA
cctgctcaccaggag

SEQ ID NO: 3264 - DNA, 15 bp, synthetic construct
  source 1..15: mol_type = other DNA
tggagtgtgacccat

SEQ ID NO: 3265 - DNA, 15 bp, synthetic construct
  source 1..15: mol_type = other DNA
attgaagccctccag

SEQ ID NO: 3266 - DNA, 15 bp, synthetic construct
  source 1..15: mol_type = other DNA
agatgaaggaatgag

SEQ ID NO: 3267 - DNA, 15 bp, synthetic construct
  source 1..15: mol_type = other DNA
cttgtcccctcacgg

SEQ ID NO: 3268 - DNA, 15 bp, synthetic construct
  source 1..15: mol_type = other DNA
tccgtgtcaacaggt

SEQ ID NO: 3269 - DNA, 15 bp, synthetic construct
  source 1..15: mol_type = other DNA
attgcaaaggcctag

SEQ ID NO: 3270 - DNA, 15 bp, synthetic construct
  source 1..15: mol_type = other DNA
cacggctctgttgct

SEQ ID NO: 3271 - DNA, 15 bp, synthetic construct
  source 1..15: mol_type = other DNA
gacacacgactgttt

SEQ ID NO: 3272 - DNA, 15 bp, synthetic construct
  source 1..15: mol_type = other DNA
aactctgacttttcc

SEQ ID NO: 3273 - DNA, 15 bp, synthetic construct
  source 1..15: mol_type = other DNA
tagttgtcctagcac

SEQ ID NO: 3274 - DNA, 15 bp, synthetic construct
  source 1..15: mol_type = other DNA
agaatcattctcaaa

SEQ ID NO: 3275 - DNA, 15 bp, synthetic construct
  source 1..15: mol_type = other DNA
ttccaggctttggcc

SEQ ID NO: 3276 - DNA, 15 bp, synthetic construct
  source 1..15: mol_type = other DNA
ctacctggtacatat

SEQ ID NO: 3277 - DNA, 15 bp, synthetic construct
  source 1..15: mol_type = other DNA
tgatcgggtccatga

SEQ ID NO: 3278 - DNA, 15 bp, synthetic construct
  source 1..15: mol_type = other DNA
ggtctggaacacgta

SEQ ID NO: 3279 - DNA, 15 bp, synthetic construct
  source 1..15: mol_type = other DNA
tgatcgggtccatga

SEQ ID NO: 3280 - DNA, 15 bp, synthetic construct
  source 1..15: mol_type = other DNA
ggtctggaacacgta

SEQ ID NO: 3281 - DNA, 15 bp, synthetic construct
  source 1..15: mol_type = other DNA
gtctcaccctatacc

SEQ ID NO: 3282 - DNA, 15 bp, synthetic construct
  source 1..15: mol_type = other DNA
gatccagggccatcc

SEQ ID NO: 3283 - DNA, 15 bp, synthetic construct
  source 1..15: mol_type = other DNA
acactggcttctaca

SEQ ID NO: 3284 - DNA, 15 bp, synthetic construct
  source 1..15: mol_type = other DNA
gctaggatgggctga

SEQ ID NO: 3285 - DNA, 15 bp, synthetic construct
  source 1..15: mol_type = other DNA
agggaggagtagagg

SEQ ID NO: 3286 - DNA, 15 bp, synthetic construct
  source 1..15: mol_type = other DNA
cccgaagccatcaag

SEQ ID NO: 3287 - DNA, 15 bp, synthetic construct
  source 1..15: mol_type = other DNA
gctgttcttaaccca

SEQ ID NO: 3288 - DNA, 15 bp, synthetic construct
  source 1..15: mol_type = other DNA
actcagcccagagca

SEQ ID NO: 3289 - DNA, 15 bp, synthetic construct
  source 1..15: mol_type = other DNA
caactggccaactcc

SEQ ID NO: 3290 - DNA, 15 bp, synthetic construct
  source 1..15: mol_type = other DNA
tgcttgggctgggta

SEQ ID NO: 3291 - DNA, 15 bp, synthetic construct
  source 1..15: mol_type = other DNA
ctcccctgctatcgt

SEQ ID NO: 3292 - DNA, 15 bp, synthetic construct
  source 1..15: mol_type = other DNA
tcacttggccttgtc

SEQ ID NO: 3293 - DNA, 15 bp, synthetic construct
  source 1..15: mol_type = other DNA
ctacaggcatcgaca

SEQ ID NO: 3294 - DNA, 15 bp, synthetic construct
  source 1..15: mol_type = other DNA
cactccctgtgaacg

SEQ ID NO: 3295 - DNA, 15 bp, synthetic construct
  source 1..15: mol_type = other DNA
tcactcccgtgaaac

SEQ ID NO: 3296 - DNA, 15 bp, synthetic construct
  source 1..15: mol_type = other DNA
cttgatgtccaggta

SEQ ID NO: 3297 - DNA, 15 bp, synthetic construct
  source 1..15: mol_type = other DNA
atgtactcccgcaag

SEQ ID NO: 3298 - DNA, 15 bp, synthetic construct
  source 1..15: mol_type = other DNA
ttgaggcatgaaggt

SEQ ID NO: 3299 - DNA, 15 bp, synthetic construct
  source 1..15: mol_type = other DNA
cccggtccaaagttc

SEQ ID NO: 3300 - DNA, 15 bp, synthetic construct
  source 1..15: mol_type = other DNA
ctgtacaggctgatg

SEQ ID NO: 3301 - DNA, 15 bp, synthetic construct
  source 1..15: mol_type = other DNA
tgtcttccaggtacc

SEQ ID NO: 3302 - DNA, 15 bp, synthetic construct
  source 1..15: mol_type = other DNA
ctgtgcaccagggat

SEQ ID NO: 3303 - DNA, 15 bp, synthetic construct
  source 1..15: mol_type = other DNA
caggcaaagtcaaac

SEQ ID NO: 3304 - DNA, 15 bp, synthetic construct
  source 1..15: mol_type = other DNA
tccttaccgggtcct

SEQ ID NO: 3305 - DNA, 15 bp, synthetic construct
  source 1..15: mol_type = other DNA
gcagctcttcgtgaa

SEQ ID NO: 3306 - DNA, 15 bp, synthetic construct
  source 1..15: mol_type = other DNA
taggaggcggtggat

SEQ ID NO: 3307 - DNA, 15 bp, synthetic construct
  source 1..15: mol_type = other DNA
acaaaggcccgtaca

SEQ ID NO: 3308 - DNA, 15 bp, synthetic construct
  source 1..15: mol_type = other DNA
ggtttctgcaaaagg

SEQ ID NO: 3309 - DNA, 15 bp, synthetic construct
  source 1..15: mol_type = other DNA
actcccctcatggac

SEQ ID NO: 3310 - DNA, 15 bp, synthetic construct
  source 1..15: mol_type = other DNA
cacagcttcttcttg

SEQ ID NO: 3311 - DNA, 15 bp, synthetic construct
  source 1..15: mol_type = other DNA
tgtggaccgcgtgac

SEQ ID NO: 3312 - DNA, 15 bp, synthetic construct
  source 1..15: mol_type = other DNA
gactgtttccaggag

SEQ ID NO: 3313 - DNA, 15 bp, synthetic construct
  source 1..15: mol_type = other DNA
tacggaggtcgactc

SEQ ID NO: 3314 - DNA, 15 bp, synthetic construct
  source 1..15: mol_type = other DNA
gggccgtactcttcg

SEQ ID NO: 3315 - DNA, 15 bp, synthetic construct
  source 1..15: mol_type = other DNA
atcgcggagggaatg

SEQ ID NO: 3316 - DNA, 15 bp, synthetic construct
  source 1..15: mol_type = other DNA
tgcgattgcagaaga

SEQ ID NO: 3317 - DNA, 15 bp, synthetic construct
  source 1..15: mol_type = other DNA
gctcggtgaactcgc

SEQ ID NO: 3318 - DNA, 15 bp, synthetic construct
  source 1..15: mol_type = other DNA
ttcagaccgtgctat

SEQ ID NO: 3319 - DNA, 15 bp, synthetic construct
  source 1..15: mol_type = other DNA
taacaacctttgctt

SEQ ID NO: 3320 - DNA, 15 bp, synthetic construct
  source 1..15: mol_type = other DNA
gcaaaaattgagaac

SEQ ID NO: 3321 - DNA, 15 bp, synthetic construct
  source 1..15: mol_type = other DNA
accctagtctgccac

SEQ ID NO: 3322 - DNA, 15 bp, synthetic construct
  source 1..15: mol_type = other DNA
tgaaacagtgtaagt

SEQ ID NO: 3323 - DNA, 15 bp, synthetic construct
  source 1..15: mol_type = other DNA
ttaagcatttgaaaa

SEQ ID NO: 3324 - DNA, 15 bp, synthetic construct
  source 1..15: mol_type = other DNA
tcagtctctcctttc

SEQ ID NO: 3325 - DNA, 15 bp, synthetic construct
  source 1..15: mol_type = other DNA
taggccgggtaatct

SEQ ID NO: 3326 - DNA, 15 bp, synthetic construct
  source 1..15: mol_type = other DNA
tttgctagtgaattg

SEQ ID NO: 3327 - DNA, 15 bp, synthetic construct
  source 1..15: mol_type = other DNA
cggaaaatgaatggc

SEQ ID NO: 3328 - DNA, 15 bp, synthetic construct
  source 1..15: mol_type = other DNA
ctgttttccaaatag

SEQ ID NO: 3329 - DNA, 15 bp, synthetic construct
  source 1..15: mol_type = other DNA
tagtcgctcaggtag

SEQ ID NO: 3330 - DNA, 15 bp, synthetic construct
  source 1..15: mol_type = other DNA
gacatcctttaccac

SEQ ID NO: 3331 - DNA, 15 bp, synthetic construct
  source 1..15: mol_type = other DNA
atgcaaatgagggtc

SEQ ID NO: 3332 - DNA, 15 bp, synthetic construct
  source 1..15: mol_type = other DNA
agagaactggtaagc

SEQ ID NO: 3333 - DNA, 15 bp, synthetic construct
  source 1..15: mol_type = other DNA
agacatggcaggacc

SEQ ID NO: 3334 - DNA, 15 bp, synthetic construct
  source 1..15: mol_type = other DNA
tcatgctgctgatgc

SEQ ID NO: 3335 - DNA, 15 bp, synthetic construct
  source 1..15: mol_type = other DNA
atcttgctgtctgtc

SEQ ID NO: 3336 - DNA, 15 bp, synthetic construct
  source 1..15: mol_type = other DNA
tagtactgagtgcgt

SEQ ID NO: 3337 - DNA, 15 bp, synthetic construct
  source 1..15: mol_type = other DNA
aggaaaagtaattca

SEQ ID NO: 3338 - DNA, 15 bp, synthetic construct
  source 1..15: mol_type = other DNA
agatggctttttgac

SEQ ID NO: 3339 - DNA, 15 bp, synthetic construct
  source 1..15: mol_type = other DNA
tcgctgtatttgctt

SEQ ID NO: 3340 - DNA, 15 bp, synthetic construct
  source 1..15: mol_type = other DNA
agatcaccaagcaac

SEQ ID NO: 3341 - DNA, 15 bp, synthetic construct
  source 1..15: mol_type = other DNA
ctccaaaactggtgc

SEQ ID NO: 3342 - DNA, 15 bp, synthetic construct
  source 1..15: mol_type = other DNA
aatgagccatccaac

SEQ ID NO: 3343 - DNA, 15 bp, synthetic construct
  source 1..15: mol_type = other DNA
ccatagatggagaag

SEQ ID NO: 3344 - DNA, 15 bp, synthetic construct
  source 1..15: mol_type = other DNA
catttgggattccac

SEQ ID NO: 3345 - DNA, 15 bp, synthetic construct
  source 1..15: mol_type = other DNA
cttccgtaggtacag

SEQ ID NO: 3346 - DNA, 15 bp, synthetic construct
  source 1..15: mol_type = other DNA
gcgtgctcatcatct

SEQ ID NO: 3347 - DNA, 15 bp, synthetic construct
  source 1..15: mol_type = other DNA
aacatgtacatgagg

SEQ ID NO: 3348 - DNA, 15 bp, synthetic construct
  source 1..15: mol_type = other DNA
tctccatgccttttc

SEQ ID NO: 3349 - DNA, 15 bp, synthetic construct
  source 1..15: mol_type = other DNA
agctgctgcctttcc

SEQ ID NO: 3350 - DNA, 15 bp, synthetic construct
  source 1..15: mol_type = other DNA
aaccctcaatatctc

SEQ ID NO: 3351 - DNA, 15 bp, synthetic construct
  source 1..15: mol_type = other DNA
cacaggtacaccacc

SEQ ID NO: 3352 - DNA, 15 bp, synthetic construct
  source 1..15: mol_type = other DNA
cctggataacacttg

SEQ ID NO: 3353 - DNA, 15 bp, synthetic construct
  source 1..15: mol_type = other DNA
ctttctcgctcctac

SEQ ID NO: 3354 - DNA, 15 bp, synthetic construct
  source 1..15: mol_type = other DNA
tccatgtactacaac

SEQ ID NO: 3355 - DNA, 15 bp, synthetic construct
  source 1..15: mol_type = other DNA
gagtggaagaggtac

SEQ ID NO: 3356 - DNA, 15 bp, synthetic construct
  source 1..15: mol_type = other DNA
tggtctcgcttaata

SEQ ID NO: 3357 - DNA, 15 bp, synthetic construct
  source 1..15: mol_type = other DNA
attctatgtcatccc

SEQ ID NO: 3358 - DNA, 15 bp, synthetic construct
  source 1..15: mol_type = other DNA
aatgccgctcttgta

SEQ ID NO: 3359 - DNA, 15 bp, synthetic construct
  source 1..15: mol_type = other DNA
cgacaccactgaggt

SEQ ID NO: 3360 - DNA, 15 bp, synthetic construct
  source 1..15: mol_type = other DNA
gaatgcatggacaag

SEQ ID NO: 3361 - DNA, 15 bp, synthetic construct
  source 1..15: mol_type = other DNA
ttcggacaaatcacg

SEQ ID NO: 3362 - DNA, 15 bp, synthetic construct
  source 1..15: mol_type = other DNA
ctacagttcgtgttc

SEQ ID NO: 3363 - DNA, 15 bp, synthetic construct
  source 1..15: mol_type = other DNA
cgggaatcgccacac

SEQ ID NO: 3364 - DNA, 15 bp, synthetic construct
  source 1..15: mol_type = other DNA
aatgagattagcaat

SEQ ID NO: 3365 - DNA, 15 bp, synthetic construct
  source 1..15: mol_type = other DNA
aaatacatgcctgag

SEQ ID NO: 3366 - DNA, 15 bp, synthetic construct
  source 1..15: mol_type = other DNA
aaatcccctctgagt

SEQ ID NO: 3367 - DNA, 15 bp, synthetic construct
  source 1..15: mol_type = other DNA
ggaacaagcttagat

SEQ ID NO: 3368 - DNA, 15 bp, synthetic construct
  source 1..15: mol_type = other DNA
tctctttccttaact

SEQ ID NO: 3369 - DNA, 15 bp, synthetic construct
  source 1..15: mol_type = other DNA
gttgtccaacgttta

SEQ ID NO: 3370 - DNA, 15 bp, synthetic construct
  source 1..15: mol_type = other DNA
ttaagtaacttagaa

SEQ ID NO: 3371 - DNA, 15 bp, synthetic construct
  source 1..15: mol_type = other DNA
ttctgtcttgtcatt

SEQ ID NO: 3372 - DNA, 15 bp, synthetic construct
  source 1..15: mol_type = other DNA
cacaaaacatacatc

SEQ ID NO: 3373 - DNA, 15 bp, synthetic construct
  source 1..15: mol_type = other DNA
cagtaactaagactt

SEQ ID NO: 3374 - DNA, 15 bp, synthetic construct
  source 1..15: mol_type = other DNA
tgaaatacaggtaac

SEQ ID NO: 3375 - DNA, 15 bp, synthetic construct
  source 1..15: mol_type = other DNA
caataattgtgtcaa

SEQ ID NO: 3376 - DNA, 15 bp, synthetic construct
  source 1..15: mol_type = other DNA
ggatgaaattgggat

SEQ ID NO: 3377 - DNA, 15 bp, synthetic construct
  source 1..15: mol_type = other DNA
ctaattatcctcaga

SEQ ID NO: 3378 - DNA, 15 bp, synthetic construct
  source 1..15: mol_type = other DNA
aagtgttcaatgatt

SEQ ID NO: 3379 - DNA, 15 bp, synthetic construct
  source 1..15: mol_type = other DNA
gcaacttgaggattt

SEQ ID NO: 3380 - DNA, 15 bp, synthetic construct
  source 1..15: mol_type = other DNA
aagtttggtccatct

SEQ ID NO: 3381 - DNA, 15 bp, synthetic construct
  source 1..15: mol_type = other DNA
agatgttcactaact

SEQ ID NO: 3382 - DNA, 15 bp, synthetic construct
  source 1..15: mol_type = other DNA
caccttcaccataga

SEQ ID NO: 3383 - DNA, 15 bp, synthetic construct
  source 1..15: mol_type = other DNA
ctgtctgtagcttaa

SEQ ID NO: 3384 - DNA, 15 bp, synthetic construct
  source 1..15: mol_type = other DNA
tttcttaattttgct

SEQ ID NO: 3385 - DNA, 15 bp, synthetic construct
  source 1..15: mol_type = other DNA
aaagaatccatgttc

SEQ ID NO: 3386 - DNA, 15 bp, synthetic construct
  source 1..15: mol_type = other DNA
caggatatcttatgc

SEQ ID NO: 3387 - DNA, 15 bp, synthetic construct
  source 1..15: mol_type = other DNA
ttaaccgaatctctc

SEQ ID NO: 3388 - DNA, 15 bp, synthetic construct
  source 1..15: mol_type = other DNA
gtggtccaactaccc

SEQ ID NO: 3389 - DNA, 15 bp, synthetic construct
  source 1..15: mol_type = other DNA
gtcccattcatctaa

SEQ ID NO: 3390 - DNA, 15 bp, synthetic construct
  source 1..15: mol_type = other DNA
catcatatccctttg

SEQ ID NO: 3391 - DNA, 15 bp, synthetic construct
  source 1..15: mol_type = other DNA
tctcagcataacgca

SEQ ID NO: 3392 - DNA, 15 bp, synthetic construct
  source 1..15: mol_type = other DNA
taggttgtggcaggt

SEQ ID NO: 3393 - DNA, 15 bp, synthetic construct
  source 1..15: mol_type = other DNA
gagtccagacaacac

SEQ ID NO: 3394 - DNA, 15 bp, synthetic construct
  source 1..15: mol_type = other DNA
gcacctatgaggaaa

SEQ ID NO: 3395 - DNA, 15 bp, synthetic construct
  source 1..15: mol_type = other DNA
acctgcaagttgatg

SEQ ID NO: 3396 - DNA, 15 bp, synthetic construct
  source 1..15: mol_type = other DNA
tacagggtaagaaat

SEQ ID NO: 3397 - DNA, 15 bp, synthetic construct
  source 1..15: mol_type = other DNA
aagggcaggtgtcag

SEQ ID NO: 3398 - DNA, 15 bp, synthetic construct
  source 1..15: mol_type = other DNA
agctaccacgctaac

SEQ ID NO: 3399 - DNA, 15 bp, synthetic construct
  source 1..15: mol_type = other DNA
gagggttaggttagc

SEQ ID NO: 3400 - DNA, 15 bp, synthetic construct
  source 1..15: mol_type = other DNA
ggctctgaaattgaa

SEQ ID NO: 3401 - DNA, 15 bp, synthetic construct
  source 1..15: mol_type = other DNA
tgccagactatttcc

SEQ ID NO: 3402 - DNA, 15 bp, synthetic construct
  source 1..15: mol_type = other DNA
ctaggacatcagtgg

SEQ ID NO: 3403 - DNA, 15 bp, synthetic construct
  source 1..15: mol_type = other DNA
gttacacagatctac

SEQ ID NO: 3404 - DNA, 15 bp, synthetic construct
  source 1..15: mol_type = other DNA
acacctggttttgat

SEQ ID NO: 3405 - DNA, 15 bp, synthetic construct
  source 1..15: mol_type = other DNA
aggtgtcagggatag

SEQ ID NO: 3406 - DNA, 15 bp, synthetic construct
  source 1..15: mol_type = other DNA
gtccctatagaggag

SEQ ID NO: 3407 - DNA, 15 bp, synthetic construct
  source 1..15: mol_type = other DNA
tctcctacagtacgt

SEQ ID NO: 3408 - DNA, 15 bp, synthetic construct
  source 1..15: mol_type = other DNA
tcccatgtacatgtc

SEQ ID NO: 3409 - DNA, 15 bp, synthetic construct
  source 1..15: mol_type = other DNA
tccctgaggctcaag

SEQ ID NO: 3410 - DNA, 15 bp, synthetic construct
  source 1..15: mol_type = other DNA
gaaggtggtagcatc

SEQ ID NO: 3411 - DNA, 15 bp, synthetic construct
  source 1..15: mol_type = other DNA
cgacgagtctcagcc

SEQ ID NO: 3412 - DNA, 15 bp, synthetic construct
  source 1..15: mol_type = other DNA
gatgttcctctcaca

SEQ ID NO: 3413 - DNA, 15 bp, synthetic construct
  source 1..15: mol_type = other DNA
aacatctacacccac

SEQ ID NO: 3414 - DNA, 15 bp, synthetic construct
  source 1..15: mol_type = other DNA
tcagaaggaggactt

SEQ ID NO: 3415 - DNA, 15 bp, synthetic construct
  source 1..15: mol_type = other DNA
agctcatttatgtct

SEQ ID NO: 3416 - DNA, 15 bp, synthetic construct
  source 1..15: mol_type = other DNA
gtgcctatgacagca

SEQ ID NO: 3417 - DNA, 15 bp, synthetic construct
  source 1..15: mol_type = other DNA
attggcacgacgttc

SEQ ID NO: 3418 - DNA, 15 bp, synthetic construct
  source 1..15: mol_type = other DNA
aagatgagaacttca

SEQ ID NO: 3419 - DNA, 15 bp, synthetic construct
  source 1..15: mol_type = other DNA
attggcacgacgttc

SEQ ID NO: 3420 - DNA, 15 bp, synthetic construct
  source 1..15: mol_type = other DNA
aagatgagaacttca

SEQ ID NO: 3421 - DNA, 15 bp, synthetic construct
  source 1..15: mol_type = other DNA
aatgtttgagcaagt

SEQ ID NO: 3422 - DNA, 15 bp, synthetic construct
  source 1..15: mol_type = other DNA
tacatggtgggatgg

SEQ ID NO: 3423 - DNA, 15 bp, synthetic construct
  source 1..15: mol_type = other DNA
tcccaccatgtattc

SEQ ID NO: 3424 - DNA, 15 bp, synthetic construct
  source 1..15: mol_type = other DNA
tggcagcccgtacac

SEQ ID NO: 3425 - DNA, 15 bp, synthetic construct
  source 1..15: mol_type = other DNA
cgtctgttgcaactc

SEQ ID NO: 3426 - DNA, 15 bp, synthetic construct
  source 1..15: mol_type = other DNA
tgctctgctctttct

SEQ ID NO: 3427 - DNA, 15 bp, synthetic construct
  source 1..15: mol_type = other DNA
ccacgagagtcacaa

SEQ ID NO: 3428 - DNA, 15 bp, synthetic construct
  source 1..15: mol_type = other DNA
gcttagcctcttata

SEQ ID NO: 3429 - DNA, 15 bp, synthetic construct
  source 1..15: mol_type = other DNA
ccacgagagtcacaa

SEQ ID NO: 3430 - DNA, 15 bp, synthetic construct
  source 1..15: mol_type = other DNA
gcttagcctcttata

SEQ ID NO: 3431 - DNA, 15 bp, synthetic construct
  source 1..15: mol_type = other DNA
agagcctctataaga

SEQ ID NO: 3432 - DNA, 15 bp, synthetic construct
  source 1..15: mol_type = other DNA
tggaacctcaccagt

SEQ ID NO: 3433 - DNA, 15 bp, synthetic construct
  source 1..15: mol_type = other DNA
cccatacctcgttgc

SEQ ID NO: 3434 - DNA, 15 bp, synthetic construct
  source 1..15: mol_type = other DNA
tactgtgctcatctt

SEQ ID NO: 3435 - DNA, 15 bp, synthetic construct
  source 1..15: mol_type = other DNA
atgagcacagtagtc

SEQ ID NO: 3436 - DNA, 15 bp, synthetic construct
  source 1..15: mol_type = other DNA
caatggatcctgatg

SEQ ID NO: 3437 - DNA, 15 bp, synthetic construct
  source 1..15: mol_type = other DNA
cacggtgacagctct

SEQ ID NO: 3438 - DNA, 15 bp, synthetic construct
  source 1..15: mol_type = other DNA
gcttcctcttaaccg

SEQ ID NO: 3439 - DNA, 15 bp, synthetic construct
  source 1..15: mol_type = other DNA
gaagctgtgagtgct

SEQ ID NO: 3440 - DNA, 15 bp, synthetic construct
  source 1..15: mol_type = other DNA
acacatttcttcttc

SEQ ID NO: 3441 - DNA, 15 bp, synthetic construct
  source 1..15: mol_type = other DNA
gtcatccctgggaag

SEQ ID NO: 3442 - DNA, 15 bp, synthetic construct
  source 1..15: mol_type = other DNA
gtctctgtgaaaaga

SEQ ID NO: 3443 - DNA, 15 bp, synthetic construct
  source 1..15: mol_type = other DNA
tcgacagagacattg

SEQ ID NO: 3444 - DNA, 15 bp, synthetic construct
  source 1..15: mol_type = other DNA
tcctcaaactaagtc

SEQ ID NO: 3445 - DNA, 15 bp, synthetic construct
  source 1..15: mol_type = other DNA
atggaagagaactac

SEQ ID NO: 3446 - DNA, 15 bp, synthetic construct
  source 1..15: mol_type = other DNA
agtgcaaccctcatg

SEQ ID NO: 3447 - DNA, 15 bp, synthetic construct
  source 1..15: mol_type = other DNA
agtaccttgacagcc

SEQ ID NO: 3448 - DNA, 15 bp, synthetic construct
  source 1..15: mol_type = other DNA
cctcatctacaatgg

SEQ ID NO: 3449 - DNA, 15 bp, synthetic construct
  source 1..15: mol_type = other DNA
agtaccttgacagcc

SEQ ID NO: 3450 - DNA, 15 bp, synthetic construct
  source 1..15: mol_type = other DNA
cctcatctacaatgg

SEQ ID NO: 3451 - DNA, 15 bp, synthetic construct
  source 1..15: mol_type = other DNA
catcacagacactca

SEQ ID NO: 3452 - DNA, 15 bp, synthetic construct
  source 1..15: mol_type = other DNA
tgcgatcttccttgc

SEQ ID NO: 3453 - DNA, 15 bp, synthetic construct
  source 1..15: mol_type = other DNA
tgctatccctcaagt

SEQ ID NO: 3454 - DNA, 15 bp, synthetic construct
  source 1..15: mol_type = other DNA
tgtacagggccccta

SEQ ID NO: 3455 - DNA, 15 bp, synthetic construct
  source 1..15: mol_type = other DNA
atgaatgagctgtgg

SEQ ID NO: 3456 - DNA, 15 bp, synthetic construct
  source 1..15: mol_type = other DNA
ccatcatcccgtttt

SEQ ID NO: 3457 - DNA, 15 bp, synthetic construct
  source 1..15: mol_type = other DNA
aaacgggatgatgga

SEQ ID NO: 3458 - DNA, 15 bp, synthetic construct
  source 1..15: mol_type = other DNA
cctggctgcattatc

SEQ ID NO: 3459 - DNA, 15 bp, synthetic construct
  source 1..15: mol_type = other DNA
ggtactgcccataac

SEQ ID NO: 3460 - DNA, 15 bp, synthetic construct
  source 1..15: mol_type = other DNA
cttcttgagtaacca

SEQ ID NO: 3461 - DNA, 15 bp, synthetic construct
  source 1..15: mol_type = other DNA
ggttactcaagaaga

SEQ ID NO: 3462 - DNA, 15 bp, synthetic construct
  source 1..15: mol_type = other DNA
tgaggctaagacgtg

SEQ ID NO: 3463 - DNA, 15 bp, synthetic construct
  source 1..15: mol_type = other DNA
tcatgcccctagaac

SEQ ID NO: 3464 - DNA, 15 bp, synthetic construct
  source 1..15: mol_type = other DNA
ctaacttctatgctg

SEQ ID NO: 3465 - DNA, 15 bp, synthetic construct
  source 1..15: mol_type = other DNA
gcatagaagttaggg

SEQ ID NO: 3466 - DNA, 15 bp, synthetic construct
  source 1..15: mol_type = other DNA
gttgagatagggtga

SEQ ID NO: 3467 - DNA, 15 bp, synthetic construct
  source 1..15: mol_type = other DNA
ttctatcccaagccc

SEQ ID NO: 3468 - DNA, 15 bp, synthetic construct
  source 1..15: mol_type = other DNA
catggccgtatacct

SEQ ID NO: 3469 - DNA, 15 bp, synthetic construct
  source 1..15: mol_type = other DNA
ctgacatccatcaca

SEQ ID NO: 3470 - DNA, 15 bp, synthetic construct
  source 1..15: mol_type = other DNA
agggaaccagtatga

SEQ ID NO: 3471 - DNA, 15 bp, synthetic construct
  source 1..15: mol_type = other DNA
tctgcatactctttg

SEQ ID NO: 3472 - DNA, 15 bp, synthetic construct
  source 1..15: mol_type = other DNA
aggtgcacggagctt

SEQ ID NO: 3473 - DNA, 15 bp, synthetic construct
  source 1..15: mol_type = other DNA
acgatagaaatcctg

SEQ ID NO: 3474 - DNA, 15 bp, synthetic construct
  source 1..15: mol_type = other DNA
ctctatgagctggtt

SEQ ID NO: 3475 - DNA, 15 bp, synthetic construct
  source 1..15: mol_type = other DNA
acgatagaaatcctg

SEQ ID NO: 3476 - DNA, 15 bp, synthetic construct
  source 1..15: mol_type = other DNA
ctctatgagctggtt

SEQ ID NO: 3477 - DNA, 15 bp, synthetic construct
  source 1..15: mol_type = other DNA
ggcaggtaggttgtc

SEQ ID NO: 3478 - DNA, 15 bp, synthetic construct
  source 1..15: mol_type = other DNA
tgactcgtctacaca

SEQ ID NO: 3479 - DNA, 15 bp, synthetic construct
  source 1..15: mol_type = other DNA
tctcggatctccctc

SEQ ID NO: 3480 - DNA, 15 bp, synthetic construct
  source 1..15: mol_type = other DNA
tttgggtgcttccta

SEQ ID NO: 3481 - DNA, 15 bp, synthetic construct
  source 1..15: mol_type = other DNA
aaatagttactgagg

SEQ ID NO: 3482 - DNA, 15 bp, synthetic construct
  source 1..15: mol_type = other DNA
attgagccatccact

SEQ ID NO: 3483 - DNA, 15 bp, synthetic construct
  source 1..15: mol_type = other DNA
aaatagttactgagg

SEQ ID NO: 3484 - DNA, 15 bp, synthetic construct
  source 1..15: mol_type = other DNA
attgagccatccact

SEQ ID NO: 3485 - DNA, 15 bp, synthetic construct
  source 1..15: mol_type = other DNA
acacgatagatgacc

SEQ ID NO: 3486 - DNA, 15 bp, synthetic construct
  source 1..15: mol_type = other DNA
catgtgtaccgatat

SEQ ID NO: 3487 - DNA, 15 bp, synthetic construct
  source 1..15: mol_type = other DNA
acacgatagatgacc

SEQ ID NO: 3488 - DNA, 15 bp, synthetic construct
  source 1..15: mol_type = other DNA
catgtgtaccgatat

SEQ ID NO: 3489 - DNA, 15 bp, synthetic construct
  source 1..15: mol_type = other DNA
tacatcatcccagtg

SEQ ID NO: 3490 - DNA, 15 bp, synthetic construct
  source 1..15: mol_type = other DNA
tgtgagctatttgag

SEQ ID NO: 3491 - DNA, 15 bp, synthetic construct
  source 1..15: mol_type = other DNA
tgtgaagggatgaag

SEQ ID NO: 3492 - DNA, 15 bp, synthetic construct
  source 1..15: mol_type = other DNA
agtccttgacttccg

SEQ ID NO: 3493 - DNA, 15 bp, synthetic construct
  source 1..15: mol_type = other DNA
aggactcaaagctac

SEQ ID NO: 3494 - DNA, 15 bp, synthetic construct
  source 1..15: mol_type = other DNA
attctaatccccatc

SEQ ID NO: 3495 - DNA, 15 bp, synthetic construct
  source 1..15: mol_type = other DNA
acattctggatgcga

SEQ ID NO: 3496 - DNA, 15 bp, synthetic construct
  source 1..15: mol_type = other DNA
actgactgcctcatc

SEQ ID NO: 3497 - DNA, 15 bp, synthetic construct
  source 1..15: mol_type = other DNA
acattctggatgcga

SEQ ID NO: 3498 - DNA, 15 bp, synthetic construct
  source 1..15: mol_type = other DNA
actgactgcctcatc

SEQ ID NO: 3499 - DNA, 15 bp, synthetic construct
  source 1..15: mol_type = other DNA
gacgatgcagtaggg

SEQ ID NO: 3500 - DNA, 15 bp, synthetic construct
  source 1..15: mol_type = other DNA
atgtgatggtaggtc

SEQ ID NO: 3501 - DNA, 15 bp, synthetic construct
  source 1..15: mol_type = other DNA
gctgagttcctatcc

SEQ ID NO: 3502 - DNA, 15 bp, synthetic construct
  source 1..15: mol_type = other DNA
ttcacctccccttat

SEQ ID NO: 3503 - DNA, 15 bp, synthetic construct
  source 1..15: mol_type = other DNA
gctaacttttgacgt

SEQ ID NO: 3504 - DNA, 15 bp, synthetic construct
  source 1..15: mol_type = other DNA
gaagtaccctcactg

SEQ ID NO: 3505 - DNA, 15 bp, synthetic construct
  source 1..15: mol_type = other DNA
ggtcagatagcaaag

SEQ ID NO: 3506 - DNA, 15 bp, synthetic construct
  source 1..15: mol_type = other DNA
cttacataccctgtg

SEQ ID NO: 3507 - DNA, 15 bp, synthetic construct
  source 1..15: mol_type = other DNA
gggacggccgttaat

SEQ ID NO: 3508 - DNA, 15 bp, synthetic construct
  source 1..15: mol_type = other DNA
cttgggttttgctag

SEQ ID NO: 3509 - DNA, 15 bp, synthetic construct
  source 1..15: mol_type = other DNA
ttgcagaaagctgtg

SEQ ID NO: 3510 - DNA, 15 bp, synthetic construct
  source 1..15: mol_type = other DNA
tttatcagagtagag

SEQ ID NO: 3511 - DNA, 15 bp, synthetic construct
  source 1..15: mol_type = other DNA
cttactgtgcgacaa

SEQ ID NO: 3512 - DNA, 15 bp, synthetic construct
  source 1..15: mol_type = other DNA
ctgtattggatgtct

SEQ ID NO: 3513 - DNA, 15 bp, synthetic construct
  source 1..15: mol_type = other DNA
ccaaagcctctacgt

SEQ ID NO: 3514 - DNA, 15 bp, synthetic construct
  source 1..15: mol_type = other DNA
actgctgtttttgga

SEQ ID NO: 3515 - DNA, 15 bp, synthetic construct
  source 1..15: mol_type = other DNA
tatagcacaactgca

SEQ ID NO: 3516 - DNA, 15 bp, synthetic construct
  source 1..15: mol_type = other DNA
aactgtggaatgacg

SEQ ID NO: 3517 - DNA, 15 bp, synthetic construct
  source 1..15: mol_type = other DNA
cttctgacagaattt

SEQ ID NO: 3518 - DNA, 15 bp, synthetic construct
  source 1..15: mol_type = other DNA
atacaacgtgcccat

SEQ ID NO: 3519 - DNA, 15 bp, synthetic construct
  source 1..15: mol_type = other DNA
cttctgacagaattt

SEQ ID NO: 3520 - DNA, 15 bp, synthetic construct
  source 1..15: mol_type = other DNA
atacaacgtgcccat

SEQ ID NO: 3521 - DNA, 15 bp, synthetic construct
  source 1..15: mol_type = other DNA
ggtggagtatctacc

SEQ ID NO: 3522 - DNA, 15 bp, synthetic construct
  source 1..15: mol_type = other DNA
tgaaggtcttctaag

SEQ ID NO: 3523 - DNA, 15 bp, synthetic construct
  source 1..15: mol_type = other DNA
tcaaaactcaaagct

SEQ ID NO: 3524 - DNA, 15 bp, synthetic construct
  source 1..15: mol_type = other DNA
taagagccatgcatc

SEQ ID NO: 3525 - DNA, 15 bp, synthetic construct
  source 1..15: mol_type = other DNA
tttgaggcatactga

SEQ ID NO: 3526 - DNA, 15 bp, synthetic construct
  source 1..15: mol_type = other DNA
ggactactatctcct

SEQ ID NO: 3527 - DNA, 15 bp, synthetic construct
  source 1..15: mol_type = other DNA
ctctccatcaaaaag

SEQ ID NO: 3528 - DNA, 15 bp, synthetic construct
  source 1..15: mol_type = other DNA
gtggaatggttcttg

SEQ ID NO: 3529 - DNA, 15 bp, synthetic construct
  source 1..15: mol_type = other DNA
taaaggcagttttgg

SEQ ID NO: 3530 - DNA, 15 bp, synthetic construct
  source 1..15: mol_type = other DNA
tgtttcaggcatgat

SEQ ID NO: 3531 - DNA, 15 bp, synthetic construct
  source 1..15: mol_type = other DNA
cttttgggagtgtgg

SEQ ID NO: 3532 - DNA, 15 bp, synthetic construct
  source 1..15: mol_type = other DNA
ttgaagaggacggaa

SEQ ID NO: 3533 - DNA, 15 bp, synthetic construct
  source 1..15: mol_type = other DNA
cttcacagagctatg

SEQ ID NO: 3534 - DNA, 15 bp, synthetic construct
  source 1..15: mol_type = other DNA
acttttaaccttcct

SEQ ID NO: 3535 - DNA, 15 bp, synthetic construct
  source 1..15: mol_type = other DNA
gtgcaatcatttaaa

SEQ ID NO: 3536 - DNA, 15 bp, synthetic construct
  source 1..15: mol_type = other DNA
tgtatggcaccaaaa

SEQ ID NO: 3537 - DNA, 15 bp, synthetic construct
  source 1..15: mol_type = other DNA
gcgaatggagtgatg

SEQ ID NO: 3538 - DNA, 15 bp, synthetic construct
  source 1..15: mol_type = other DNA
gcttcctatttatcc

SEQ ID NO: 3539 - DNA, 15 bp, synthetic construct
  source 1..15: mol_type = other DNA
ttccacagaagattt

SEQ ID NO: 3540 - DNA, 15 bp, synthetic construct
  source 1..15: mol_type = other DNA
tagtaacgcaaagga

SEQ ID NO: 3541 - DNA, 15 bp, synthetic construct
  source 1..15: mol_type = other DNA
gtctgcacaagaacg

SEQ ID NO: 3542 - DNA, 15 bp, synthetic construct
  source 1..15: mol_type = other DNA
gtgtgttttctcttc

SEQ ID NO: 3543 - DNA, 15 bp, synthetic construct
  source 1..15: mol_type = other DNA
agaaaatgaagagtt

SEQ ID NO: 3544 - DNA, 15 bp, synthetic construct
  source 1..15: mol_type = other DNA
tcatttagtgagagc

SEQ ID NO: 3545 - DNA, 15 bp, synthetic construct
  source 1..15: mol_type = other DNA
cttcacaggcttaag

SEQ ID NO: 3546 - DNA, 15 bp, synthetic construct
  source 1..15: mol_type = other DNA
gtggcatctcataaa

SEQ ID NO: 3547 - DNA, 15 bp, synthetic construct
  source 1..15: mol_type = other DNA
ggtccactcatcttc

SEQ ID NO: 3548 - DNA, 15 bp, synthetic construct
  source 1..15: mol_type = other DNA
cacttaatcgcgatc

SEQ ID NO: 3549 - DNA, 15 bp, synthetic construct
  source 1..15: mol_type = other DNA
aagtgtaaaattcag

SEQ ID NO: 3550 - DNA, 15 bp, synthetic construct
  source 1..15: mol_type = other DNA
tcatgatgcaagaat

SEQ ID NO: 3551 - DNA, 15 bp, synthetic construct
  source 1..15: mol_type = other DNA
tggctgaaccgttac

SEQ ID NO: 3552 - DNA, 15 bp, synthetic construct
  source 1..15: mol_type = other DNA
aatgacagtttcaga

SEQ ID NO: 3553 - DNA, 15 bp, synthetic construct
  source 1..15: mol_type = other DNA
cttttgctctctggg

SEQ ID NO: 3554 - DNA, 15 bp, synthetic construct
  source 1..15: mol_type = other DNA
tcaaaaagaaatggt

SEQ ID NO: 3555 - DNA, 15 bp, synthetic construct
  source 1..15: mol_type = other DNA
gccctatcctgcaaa

SEQ ID NO: 3556 - DNA, 15 bp, synthetic construct
  source 1..15: mol_type = other DNA
agacgatgacatcgg

SEQ ID NO: 3557 - DNA, 15 bp, synthetic construct
  source 1..15: mol_type = other DNA
taggatcgcgtcttc

SEQ ID NO: 3558 - DNA, 15 bp, synthetic construct
  source 1..15: mol_type = other DNA
catcaggtttactcc

SEQ ID NO: 3559 - DNA, 15 bp, synthetic construct
  source 1..15: mol_type = other DNA
ttattcttcttgcgc

SEQ ID NO: 3560 - DNA, 15 bp, synthetic construct
  source 1..15: mol_type = other DNA
aattatgcagtgtgt

SEQ ID NO: 3561 - DNA, 15 bp, synthetic construct
  source 1..15: mol_type = other DNA
tacaacaaaaagcct

SEQ ID NO: 3562 - DNA, 15 bp, synthetic construct
  source 1..15: mol_type = other DNA
ctctctgggccatga

SEQ ID NO: 3563 - DNA, 15 bp, synthetic construct
  source 1..15: mol_type = other DNA
taatgggagagtttt

SEQ ID NO: 3564 - DNA, 15 bp, synthetic construct
  source 1..15: mol_type = other DNA
ccaaagacagtcagc

SEQ ID NO: 3565 - DNA, 15 bp, synthetic construct
  source 1..15: mol_type = other DNA
aacagatccgtggtg

SEQ ID NO: 3566 - DNA, 15 bp, synthetic construct
  source 1..15: mol_type = other DNA
tgagtaactgtcctt

SEQ ID NO: 3567 - DNA, 15 bp, synthetic construct
  source 1..15: mol_type = other DNA
acagagttaggtacc

SEQ ID NO: 3568 - DNA, 15 bp, synthetic construct
  source 1..15: mol_type = other DNA
ctcttggcaagtctg

SEQ ID NO: 3569 - DNA, 15 bp, synthetic construct
  source 1..15: mol_type = other DNA
agaagctgtagaatt

SEQ ID NO: 3570 - DNA, 15 bp, synthetic construct
  source 1..15: mol_type = other DNA
taacatacaaacagt

SEQ ID NO: 3571 - DNA, 15 bp, synthetic construct
  source 1..15: mol_type = other DNA
actttgtggctgatt

SEQ ID NO: 3572 - DNA, 15 bp, synthetic construct
  source 1..15: mol_type = other DNA
tttccaacccgattc

SEQ ID NO: 3573 - DNA, 15 bp, synthetic construct
  source 1..15: mol_type = other DNA
acatcaaagacgatt

SEQ ID NO: 3574 - DNA, 15 bp, synthetic construct
  source 1..15: mol_type = other DNA
acacaaaatctaggc

SEQ ID NO: 3575 - DNA, 15 bp, synthetic construct
  source 1..15: mol_type = other DNA
ctcagacatcttggt

SEQ ID NO: 3576 - DNA, 15 bp, synthetic construct
  source 1..15: mol_type = other DNA
gagttatgaagcact

SEQ ID NO: 3577 - DNA, 15 bp, synthetic construct
  source 1..15: mol_type = other DNA
tcaacatagtaccat

SEQ ID NO: 3578 - DNA, 15 bp, synthetic construct
  source 1..15: mol_type = other DNA
gttcagagatttcag

SEQ ID NO: 3579 - DNA, 15 bp, synthetic construct
  source 1..15: mol_type = other DNA
acatttctgaaccat

SEQ ID NO: 3580 - DNA, 15 bp, synthetic construct
  source 1..15: mol_type = other DNA
ctggcagatgtagta

SEQ ID NO: 3581 - DNA, 15 bp, synthetic construct
  source 1..15: mol_type = other DNA
tgtgcttgcttccac

SEQ ID NO: 3582 - DNA, 15 bp, synthetic construct
  source 1..15: mol_type = other DNA
aacgtgtatctagaa

SEQ ID NO: 3583 - DNA, 15 bp, synthetic construct
  source 1..15: mol_type = other DNA
actacattgatgtta

SEQ ID NO: 3584 - DNA, 15 bp, synthetic construct
  source 1..15: mol_type = other DNA
ttcttaatctgcagt

SEQ ID NO: 3585 - DNA, 15 bp, synthetic construct
  source 1..15: mol_type = other DNA
gggatttacttttcc

SEQ ID NO: 3586 - DNA, 15 bp, synthetic construct
  source 1..15: mol_type = other DNA
gacctttcctctaat

SEQ ID NO: 3587 - DNA, 15 bp, synthetic construct
  source 1..15: mol_type = other DNA
gtcattgagtaatta

SEQ ID NO: 3588 - DNA, 15 bp, synthetic construct
  source 1..15: mol_type = other DNA
tttctcctaattcac

SEQ ID NO: 3589 - DNA, 15 bp, synthetic construct
  source 1..15: mol_type = other DNA
tccttcttttaggca

SEQ ID NO: 3590 - DNA, 15 bp, synthetic construct
  source 1..15: mol_type = other DNA
aaagaaggaattgtc

SEQ ID NO: 3591 - DNA, 15 bp, synthetic construct
  source 1..15: mol_type = other DNA
tttccaatcttcaaa

SEQ ID NO: 3592 - DNA, 15 bp, synthetic construct
  source 1..15: mol_type = other DNA
ctagaaccagtcttg

SEQ ID NO: 3593 - DNA, 15 bp, synthetic construct
  source 1..15: mol_type = other DNA
ttctcttctctaact

SEQ ID NO: 3594 - DNA, 15 bp, synthetic construct
  source 1..15: mol_type = other DNA
tttaaatggcgggaa

SEQ ID NO: 3595 - DNA, 15 bp, synthetic construct
  source 1..15: mol_type = other DNA
aagaggacaaattca

SEQ ID NO: 3596 - DNA, 15 bp, synthetic construct
  source 1..15: mol_type = other DNA
aaaatatggccgtac

SEQ ID NO: 3597 - DNA, 15 bp, synthetic construct
  source 1..15: mol_type = other DNA
cgactgaacgaagtg

SEQ ID NO: 3598 - DNA, 15 bp, synthetic construct
  source 1..15: mol_type = other DNA
cacttcctcaattta

SEQ ID NO: 3599 - DNA, 15 bp, synthetic construct
  source 1..15: mol_type = other DNA
catgaacgcacacca

SEQ ID NO: 3600 - DNA, 15 bp, synthetic construct
  source 1..15: mol_type = other DNA
gtgtctcattcgtga

SEQ ID NO: 3601 - DNA, 15 bp, synthetic construct
  source 1..15: mol_type = other DNA
ttaccagaaacgata

SEQ ID NO: 3602 - DNA, 15 bp, synthetic construct
  source 1..15: mol_type = other DNA
cacagaccacatagt

SEQ ID NO: 3603 - DNA, 15 bp, synthetic construct
  source 1..15: mol_type = other DNA
ctgccttcaaataat

SEQ ID NO: 3604 - DNA, 15 bp, synthetic construct
  source 1..15: mol_type = other DNA
tcttcgccaatacaa

SEQ ID NO: 3605 - DNA, 15 bp, synthetic construct
  source 1..15: mol_type = other DNA
cagcataactgagca

SEQ ID NO: 3606 - DNA, 15 bp, synthetic construct
  source 1..15: mol_type = other DNA
ataagcccaaatcac

SEQ ID NO: 3607 - DNA, 15 bp, synthetic construct
  source 1..15: mol_type = other DNA
ttgttactctctgta

SEQ ID NO: 3608 - DNA, 15 bp, synthetic construct
  source 1..15: mol_type = other DNA
agtttccccagtcct

SEQ ID NO: 3609 - DNA, 15 bp, synthetic construct
  source 1..15: mol_type = other DNA
gaattgctggagttc

SEQ ID NO: 3610 - DNA, 15 bp, synthetic construct
  source 1..15: mol_type = other DNA
ccactgttgctatta

SEQ ID NO: 3611 - DNA, 15 bp, synthetic construct
  source 1..15: mol_type = other DNA
atgctggtgatccca

SEQ ID NO: 3612 - DNA, 15 bp, synthetic construct
  source 1..15: mol_type = other DNA
cactgttagtgcata

SEQ ID NO: 3613 - DNA, 15 bp, synthetic construct
  source 1..15: mol_type = other DNA
acttatttttcatct

SEQ ID NO: 3614 - DNA, 15 bp, synthetic construct
  source 1..15: mol_type = other DNA
atgctgttggaatgc

SEQ ID NO: 3615 - DNA, 15 bp, synthetic construct
  source 1..15: mol_type = other DNA
gagccatttatagta

SEQ ID NO: 3616 - DNA, 15 bp, synthetic construct
  source 1..15: mol_type = other DNA
tcctcaggacacaag

SEQ ID NO: 3617 - DNA, 15 bp, synthetic construct
  source 1..15: mol_type = other DNA
ttgccatctgatgta

SEQ ID NO: 3618 - DNA, 15 bp, synthetic construct
  source 1..15: mol_type = other DNA
cattttgctagtata

SEQ ID NO: 3619 - DNA, 15 bp, synthetic construct
  source 1..15: mol_type = other DNA
accgagagaacattt

SEQ ID NO: 3620 - DNA, 15 bp, synthetic construct
  source 1..15: mol_type = other DNA
agatagcaggagaag

SEQ ID NO: 3621 - DNA, 15 bp, synthetic construct
  source 1..15: mol_type = other DNA
caaacttacttacac

SEQ ID NO: 3622 - DNA, 15 bp, synthetic construct
  source 1..15: mol_type = other DNA
ggtctcttgacttaa

SEQ ID NO: 3623 - DNA, 15 bp, synthetic construct
  source 1..15: mol_type = other DNA
agccattgtttctgc

SEQ ID NO: 3624 - DNA, 15 bp, synthetic construct
  source 1..15: mol_type = other DNA
tctgcaacatccgtt

SEQ ID NO: 3625 - DNA, 15 bp, synthetic construct
  source 1..15: mol_type = other DNA
tcaacctccacagcc

SEQ ID NO: 3626 - DNA, 15 bp, synthetic construct
  source 1..15: mol_type = other DNA
cttttgatgcatttt

SEQ ID NO: 3627 - DNA, 15 bp, synthetic construct
  source 1..15: mol_type = other DNA
tgtgtacaagcagat

SEQ ID NO: 3628 - DNA, 15 bp, synthetic construct
  source 1..15: mol_type = other DNA
accaacctgttcttg

SEQ ID NO: 3629 - DNA, 15 bp, synthetic construct
  source 1..15: mol_type = other DNA
gatgaggatcgtaac

SEQ ID NO: 3630 - DNA, 15 bp, synthetic construct
  source 1..15: mol_type = other DNA
cctacagtcagactc

SEQ ID NO: 3631 - DNA, 15 bp, synthetic construct
  source 1..15: mol_type = other DNA
ggacagaatcagtgt

SEQ ID NO: 3632 - DNA, 15 bp, synthetic construct
  source 1..15: mol_type = other DNA
gggaagaaacctacc

SEQ ID NO: 3633 - DNA, 15 bp, synthetic construct
  source 1..15: mol_type = other DNA
acctcctctcaaaga

SEQ ID NO: 3634 - DNA, 15 bp, synthetic construct
  source 1..15: mol_type = other DNA
aatctaccatgacta

SEQ ID NO: 3635 - DNA, 15 bp, synthetic construct
  source 1..15: mol_type = other DNA
ttagcctttgggttt

SEQ ID NO: 3636 - DNA, 15 bp, synthetic construct
  source 1..15: mol_type = other DNA
ttaaatgacctaagc

SEQ ID NO: 3637 - DNA, 15 bp, synthetic construct
  source 1..15: mol_type = other DNA
tgttatgctggtcag

SEQ ID NO: 3638 - DNA, 15 bp, synthetic construct
  source 1..15: mol_type = other DNA
cttaagagaagaaca

SEQ ID NO: 3639 - DNA, 15 bp, synthetic construct
  source 1..15: mol_type = other DNA
ttcctcccgacttat

SEQ ID NO: 3640 - DNA, 15 bp, synthetic construct
  source 1..15: mol_type = other DNA
tccaacccctaggac

SEQ ID NO: 3641 - DNA, 15 bp, synthetic construct
  source 1..15: mol_type = other DNA
actccctagcatcca

SEQ ID NO: 3642 - DNA, 15 bp, synthetic construct
  source 1..15: mol_type = other DNA
acataaatgttttca

SEQ ID NO: 3643 - DNA, 15 bp, synthetic construct
  source 1..15: mol_type = other DNA
gcttcaaaataatgt

SEQ ID NO: 3644 - DNA, 15 bp, synthetic construct
  source 1..15: mol_type = other DNA
tccagattccccgaa

SEQ ID NO: 3645 - DNA, 15 bp, synthetic construct
  source 1..15: mol_type = other DNA
gttggattttcaaaa

SEQ ID NO: 3646 - DNA, 15 bp, synthetic construct
  source 1..15: mol_type = other DNA
ttacaatgatgctaa

SEQ ID NO: 3647 - DNA, 15 bp, synthetic construct
  source 1..15: mol_type = other DNA
taagtttccatccaa

SEQ ID NO: 3648 - DNA, 15 bp, synthetic construct
  source 1..15: mol_type = other DNA
acctatttgaaagga

SEQ ID NO: 3649 - DNA, 15 bp, synthetic construct
  source 1..15: mol_type = other DNA
ctatgttttggaagt

SEQ ID NO: 3650 - DNA, 15 bp, synthetic construct
  source 1..15: mol_type = other DNA
ttaaggcatcaaagt

SEQ ID NO: 3651 - DNA, 15 bp, synthetic construct
  source 1..15: mol_type = other DNA
tattggctgctacat

SEQ ID NO: 3652 - DNA, 15 bp, synthetic construct
  source 1..15: mol_type = other DNA
cttccttcacacaga

SEQ ID NO: 3653 - DNA, 15 bp, synthetic construct
  source 1..15: mol_type = other DNA
tctttaacatggttc

SEQ ID NO: 3654 - DNA, 15 bp, synthetic construct
  source 1..15: mol_type = other DNA
ccaagttccaactta

SEQ ID NO: 3655 - DNA, 15 bp, synthetic construct
  source 1..15: mol_type = other DNA
ttgatttcctctccc

SEQ ID NO: 3656 - DNA, 15 bp, synthetic construct
  source 1..15: mol_type = other DNA
tgttaatgcctcctt

SEQ ID NO: 3657 - DNA, 15 bp, synthetic construct
  source 1..15: mol_type = other DNA
gcaaatagagacaca

SEQ ID NO: 3658 - DNA, 15 bp, synthetic construct
  source 1..15: mol_type = other DNA
gaaaaatattgaagt

SEQ ID NO: 3659 - DNA, 15 bp, synthetic construct
  source 1..15: mol_type = other DNA
atagtcaagatgttt

SEQ ID NO: 3660 - DNA, 15 bp, synthetic construct
  source 1..15: mol_type = other DNA
tactcaccaggagga

SEQ ID NO: 3661 - DNA, 15 bp, synthetic construct
  source 1..15: mol_type = other DNA
ggtagaaccacttaa

SEQ ID NO: 3662 - DNA, 15 bp, synthetic construct
  source 1..15: mol_type = other DNA
acatttgtgttagca

SEQ ID NO: 3663 - DNA, 15 bp, synthetic construct
  source 1..15: mol_type = other DNA
cagacctaaagaaac

SEQ ID NO: 3664 - DNA, 15 bp, synthetic construct
  source 1..15: mol_type = other DNA
aaggatagctgtgga

SEQ ID NO: 3665 - DNA, 15 bp, synthetic construct
  source 1..15: mol_type = other DNA
gagaggcatgtcaag

SEQ ID NO: 3666 - DNA, 15 bp, synthetic construct
  source 1..15: mol_type = other DNA
ttgctgatattaaga

SEQ ID NO: 3667 - DNA, 15 bp, synthetic construct
  source 1..15: mol_type = other DNA
aaagctacattgaca

SEQ ID NO: 3668 - DNA, 15 bp, synthetic construct
  source 1..15: mol_type = other DNA
tttgccactattatc

SEQ ID NO: 3669 - DNA, 15 bp, synthetic construct
  source 1..15: mol_type = other DNA
gattgctagacagac

SEQ ID NO: 3670 - DNA, 15 bp, synthetic construct
  source 1..15: mol_type = other DNA
aaaggtactgaaagg

SEQ ID NO: 3671 - DNA, 15 bp, synthetic construct
  source 1..15: mol_type = other DNA
aactcatctctggta

SEQ ID NO: 3672 - DNA, 15 bp, synthetic construct
  source 1..15: mol_type = other DNA
tggttagaaacactt

SEQ ID NO: 3673 - DNA, 15 bp, synthetic construct
  source 1..15: mol_type = other DNA
atattgcatatgaag

SEQ ID NO: 3674 - DNA, 15 bp, synthetic construct
  source 1..15: mol_type = other DNA
agcaacattcacaga

SEQ ID NO: 3675 - DNA, 15 bp, synthetic construct
  source 1..15: mol_type = other DNA
aatgcccatggataa

SEQ ID NO: 3676 - DNA, 15 bp, synthetic construct
  source 1..15: mol_type = other DNA
gaacaaaacattaca

SEQ ID NO: 3677 - DNA, 15 bp, synthetic construct
  source 1..15: mol_type = other DNA
atgacctaaaaagct

SEQ ID NO: 3678 - DNA, 15 bp, synthetic construct
  source 1..15: mol_type = other DNA
gaaacaactctgaag

SEQ ID NO: 3679 - DNA, 15 bp, synthetic construct
  source 1..15: mol_type = other DNA
taaccagttttgctc

SEQ ID NO: 3680 - DNA, 15 bp, synthetic construct
  source 1..15: mol_type = other DNA
aacaaaggctgaaga

SEQ ID NO: 3681 - DNA, 15 bp, synthetic construct
  source 1..15: mol_type = other DNA
acataagtttccaac

SEQ ID NO: 3682 - DNA, 15 bp, synthetic construct
  source 1..15: mol_type = other DNA
actattatcttttca

SEQ ID NO: 3683 - DNA, 15 bp, synthetic construct
  source 1..15: mol_type = other DNA
cagatccagactgtg

SEQ ID NO: 3684 - DNA, 15 bp, synthetic construct
  source 1..15: mol_type = other DNA
agggagcccttttga

SEQ ID NO: 3685 - DNA, 15 bp, synthetic construct
  source 1..15: mol_type = other DNA
tgcttactgcaggtc

SEQ ID NO: 3686 - DNA, 15 bp, synthetic construct
  source 1..15: mol_type = other DNA
aggatgagcttagta

SEQ ID NO: 3687 - DNA, 15 bp, synthetic construct
  source 1..15: mol_type = other DNA
actaaggtggtttgg

SEQ ID NO: 3688 - DNA, 15 bp, synthetic construct
  source 1..15: mol_type = other DNA
agctcttcctaagta

SEQ ID NO: 3689 - DNA, 15 bp, synthetic construct
  source 1..15: mol_type = other DNA
cagggtgcttgtatg

SEQ ID NO: 3690 - DNA, 15 bp, synthetic construct
  source 1..15: mol_type = other DNA
ctcaaaagtagtaca

SEQ ID NO: 3691 - DNA, 15 bp, synthetic construct
  source 1..15: mol_type = other DNA
cataggttgttcctt

SEQ ID NO: 3692 - DNA, 15 bp, synthetic construct
  source 1..15: mol_type = other DNA
actttgatacctatg

SEQ ID NO: 3693 - DNA, 15 bp, synthetic construct
  source 1..15: mol_type = other DNA
ccttcactactgact

SEQ ID NO: 3694 - DNA, 15 bp, synthetic construct
  source 1..15: mol_type = other DNA
gaactgaagaaacga

SEQ ID NO: 3695 - DNA, 15 bp, synthetic construct
  source 1..15: mol_type = other DNA
cataccaaatgtctt

SEQ ID NO: 3696 - DNA, 15 bp, synthetic construct
  source 1..15: mol_type = other DNA
cactcagagttaatc

SEQ ID NO: 3697 - DNA, 15 bp, synthetic construct
  source 1..15: mol_type = other DNA
tcatgtttttgcctc

SEQ ID NO: 3698 - DNA, 15 bp, synthetic construct
  source 1..15: mol_type = other DNA
ttaagaaagcatggc

SEQ ID NO: 3699 - DNA, 15 bp, synthetic construct
  source 1..15: mol_type = other DNA
ctagaaaagttggtt

SEQ ID NO: 3700 - DNA, 15 bp, synthetic construct
  source 1..15: mol_type = other DNA
gtttccatcacagat

SEQ ID NO: 3701 - DNA, 15 bp, synthetic construct
  source 1..15: mol_type = other DNA
atttgaggtcctctt

SEQ ID NO: 3702 - DNA, 15 bp, synthetic construct
  source 1..15: mol_type = other DNA
agattgcacaacagc

SEQ ID NO: 3703 - DNA, 15 bp, synthetic construct
  source 1..15: mol_type = other DNA
atcaatcccctcacc

SEQ ID NO: 3704 - DNA, 15 bp, synthetic construct
  source 1..15: mol_type = other DNA
tgatactttaagagg

SEQ ID NO: 3705 - DNA, 15 bp, synthetic construct
  source 1..15: mol_type = other DNA
gcaaatatcatgcaa

SEQ ID NO: 3706 - DNA, 15 bp, synthetic construct
  source 1..15: mol_type = other DNA
gactttttagcttca

SEQ ID NO: 3707 - DNA, 15 bp, synthetic construct
  source 1..15: mol_type = other DNA
agttatcaactcttt

SEQ ID NO: 3708 - DNA, 15 bp, synthetic construct
  source 1..15: mol_type = other DNA
aattttagatgaagt

SEQ ID NO: 3709 - DNA, 15 bp, synthetic construct
  source 1..15: mol_type = other DNA
agtaggagttttgta

SEQ ID NO: 3710 - DNA, 15 bp, synthetic construct
  source 1..15: mol_type = other DNA
cttggatcaggacac

SEQ ID NO: 3711 - DNA, 15 bp, synthetic construct
  source 1..15: mol_type = other DNA
ggtgatggaacttca

SEQ ID NO: 3712 - DNA, 15 bp, synthetic construct
  source 1..15: mol_type = other DNA
gtccaaataggatct

SEQ ID NO: 3713 - DNA, 15 bp, synthetic construct
  source 1..15: mol_type = other DNA
accaagtcacctgtt

SEQ ID NO: 3714 - DNA, 15 bp, synthetic construct
  source 1..15: mol_type = other DNA
aaagtcagaaagttt

SEQ ID NO: 3715 - DNA, 15 bp, synthetic construct
  source 1..15: mol_type = other DNA
tcatttcagtgtggt

SEQ ID NO: 3716 - DNA, 15 bp, synthetic construct
  source 1..15: mol_type = other DNA
aaactgggcttatct

SEQ ID NO: 3717 - DNA, 15 bp, synthetic construct
  source 1..15: mol_type = other DNA
ccaaatattgcacat

SEQ ID NO: 3718 - DNA, 15 bp, synthetic construct
  source 1..15: mol_type = other DNA
acgaacttgtgctct

SEQ ID NO: 3719 - DNA, 15 bp, synthetic construct
  source 1..15: mol_type = other DNA
acctacaacaggagg

SEQ ID NO: 3720 - DNA, 15 bp, synthetic construct
  source 1..15: mol_type = other DNA
gaagctcagagttga

SEQ ID NO: 3721 - DNA, 15 bp, synthetic construct
  source 1..15: mol_type = other DNA
accaccctggattcg

SEQ ID NO: 3722 - DNA, 15 bp, synthetic construct
  source 1..15: mol_type = other DNA
ctataatagaacagt

SEQ ID NO: 3723 - DNA, 15 bp, synthetic construct
  source 1..15: mol_type = other DNA
aaccatttttcactt

SEQ ID NO: 3724 - DNA, 15 bp, synthetic construct
  source 1..15: mol_type = other DNA
ctttattctctgatt

SEQ ID NO: 3725 - DNA, 15 bp, synthetic construct
  source 1..15: mol_type = other DNA
tagctgtctcatccc

SEQ ID NO: 3726 - DNA, 15 bp, synthetic construct
  source 1..15: mol_type = other DNA
agattggcagattag

SEQ ID NO: 3727 - DNA, 15 bp, synthetic construct
  source 1..15: mol_type = other DNA
cacttcttctttctt

SEQ ID NO: 3728 - DNA, 15 bp, synthetic construct
  source 1..15: mol_type = other DNA
cgtagagggaatgtg

SEQ ID NO: 3729 - DNA, 15 bp, synthetic construct
  source 1..15: mol_type = other DNA
cttgatgagttctgc

SEQ ID NO: 3730 - DNA, 15 bp, synthetic construct
  source 1..15: mol_type = other DNA
aggtcttttgtgcca

SEQ ID NO: 3731 - DNA, 15 bp, synthetic construct
  source 1..15: mol_type = other DNA
tcaccatgttcttgg

SEQ ID NO: 3732 - DNA, 15 bp, synthetic construct
  source 1..15: mol_type = other DNA
cactgaagtcgatgc

SEQ ID NO: 3733 - DNA, 15 bp, synthetic construct
  source 1..15: mol_type = other DNA
atttccgctggaact

SEQ ID NO: 3734 - DNA, 15 bp, synthetic construct
  source 1..15: mol_type = other DNA
tgcgccggacaatct

SEQ ID NO: 3735 - DNA, 15 bp, synthetic construct
  source 1..15: mol_type = other DNA
cggccaaagtcatcg

SEQ ID NO: 3736 - DNA, 15 bp, synthetic construct
  source 1..15: mol_type = other DNA
ggcaaaaccattgtg

SEQ ID NO: 3737 - DNA, 15 bp, synthetic construct
  source 1..15: mol_type = other DNA
agaaggtccatccca

SEQ ID NO: 3738 - DNA, 15 bp, synthetic construct
  source 1..15: mol_type = other DNA
ttgtaggatatccgt

SEQ ID NO: 3739 - DNA, 15 bp, synthetic construct
  source 1..15: mol_type = other DNA
acatcagcagtgtcg

SEQ ID NO: 3740 - DNA, 15 bp, synthetic construct
  source 1..15: mol_type = other DNA
ttttcttgcctggag

SEQ ID NO: 3741 - DNA, 15 bp, synthetic construct
  source 1..15: mol_type = other DNA
agttctatgtggcag

SEQ ID NO: 3742 - DNA, 15 bp, synthetic construct
  source 1..15: mol_type = other DNA
tctcctcgttgatga

SEQ ID NO: 3743 - DNA, 15 bp, synthetic construct
  source 1..15: mol_type = other DNA
atcaactggcacctc

SEQ ID NO: 3744 - DNA, 15 bp, synthetic construct
  source 1..15: mol_type = other DNA
agtggactctttatt

SEQ ID NO: 3745 - DNA, 15 bp, synthetic construct
  source 1..15: mol_type = other DNA
aagagacagtagggc

SEQ ID NO: 3746 - DNA, 15 bp, synthetic construct
  source 1..15: mol_type = other DNA
tctcatcactatact

SEQ ID NO: 3747 - DNA, 15 bp, synthetic construct
  source 1..15: mol_type = other DNA
agccactcacctttg

SEQ ID NO: 3748 - DNA, 15 bp, synthetic construct
  source 1..15: mol_type = other DNA
tgcaaagcaccatct

SEQ ID NO: 3749 - DNA, 15 bp, synthetic construct
  source 1..15: mol_type = other DNA
ccacacaataactca

SEQ ID NO: 3750 - DNA, 15 bp, synthetic construct
  source 1..15: mol_type = other DNA
gagctctcggttggt

SEQ ID NO: 3751 - DNA, 15 bp, synthetic construct
  source 1..15: mol_type = other DNA
tgtgtttatcaagtt

SEQ ID NO: 3752 - DNA, 15 bp, synthetic construct
  source 1..15: mol_type = other DNA
acggttggttttcac

SEQ ID NO: 3753 - DNA, 15 bp, synthetic construct
  source 1..15: mol_type = other DNA
cctgttcttcatcgg

SEQ ID NO: 3754 - DNA, 15 bp, synthetic construct
  source 1..15: mol_type = other DNA
cagatcacacagatg

SEQ ID NO: 3755 - DNA, 15 bp, synthetic construct
  source 1..15: mol_type = other DNA
ctctgcaccttcatg

SEQ ID NO: 3756 - DNA, 15 bp, synthetic construct
  source 1..15: mol_type = other DNA
gagcatgctgaaggt

SEQ ID NO: 3757 - DNA, 15 bp, synthetic construct
  source 1..15: mol_type = other DNA
atcggctacacctgc

SEQ ID NO: 3758 - DNA, 15 bp, synthetic construct
  source 1..15: mol_type = other DNA
tgaagagaatgatgt

SEQ ID NO: 3759 - DNA, 15 bp, synthetic construct
  source 1..15: mol_type = other DNA
gtagaggtgattgcc

SEQ ID NO: 3760 - DNA, 15 bp, synthetic construct
  source 1..15: mol_type = other DNA
gggtcttcgctgttg

SEQ ID NO: 3761 - DNA, 15 bp, synthetic construct
  source 1..15: mol_type = other DNA
cacgctttcaaggtg

SEQ ID NO: 3762 - DNA, 15 bp, synthetic construct
  source 1..15: mol_type = other DNA
cttctgcttgcatct

SEQ ID NO: 3763 - DNA, 15 bp, synthetic construct
  source 1..15: mol_type = other DNA
caacgatctcagcag

SEQ ID NO: 3764 - DNA, 15 bp, synthetic construct
  source 1..15: mol_type = other DNA
acctgtttcctggac

SEQ ID NO: 3765 - DNA, 15 bp, synthetic construct
  source 1..15: mol_type = other DNA
acttagatctgaccg

SEQ ID NO: 3766 - DNA, 15 bp, synthetic construct
  source 1..15: mol_type = other DNA
tctgcattctcccta

SEQ ID NO: 3767 - DNA, 15 bp, synthetic construct
  source 1..15: mol_type = other DNA
ggctttccctttcgg

SEQ ID NO: 3768 - DNA, 15 bp, synthetic construct
  source 1..15: mol_type = other DNA
ctgctcttcgcgaac

SEQ ID NO: 3769 - DNA, 15 bp, synthetic construct
  source 1..15: mol_type = other DNA
cagtacacacacagt

SEQ ID NO: 3770 - DNA, 15 bp, synthetic construct
  source 1..15: mol_type = other DNA
ttcagagtactcaca

SEQ ID NO: 3771 - DNA, 15 bp, synthetic construct
  source 1..15: mol_type = other DNA
ggaattctgactaat

SEQ ID NO: 3772 - DNA, 15 bp, synthetic construct
  source 1..15: mol_type = other DNA
ttctgaacttgcaac

SEQ ID NO: 3773 - DNA, 15 bp, synthetic construct
  source 1..15: mol_type = other DNA
gctggtttaagataa

SEQ ID NO: 3774 - DNA, 15 bp, synthetic construct
  source 1..15: mol_type = other DNA
cttaatttcaagttc

SEQ ID NO: 3775 - DNA, 15 bp, synthetic construct
  source 1..15: mol_type = other DNA
tgttgtctaaggatt

SEQ ID NO: 3776 - DNA, 15 bp, synthetic construct
  source 1..15: mol_type = other DNA
ccactgttttcttat

SEQ ID NO: 3777 - DNA, 15 bp, synthetic construct
  source 1..15: mol_type = other DNA
ttttgttggtcactt

SEQ ID NO: 3778 - DNA, 15 bp, synthetic construct
  source 1..15: mol_type = other DNA
gttattccaggacag

SEQ ID NO: 3779 - DNA, 15 bp, synthetic construct
  source 1..15: mol_type = other DNA
tattccaaccaatcc

SEQ ID NO: 3780 - DNA, 15 bp, synthetic construct
  source 1..15: mol_type = other DNA
ccaactacctaacac

SEQ ID NO: 3781 - DNA, 15 bp, synthetic construct
  source 1..15: mol_type = other DNA
ttttaccttctgtgg

SEQ ID NO: 3782 - DNA, 15 bp, synthetic construct
  source 1..15: mol_type = other DNA
tgatggtgtttgttc

SEQ ID NO: 3783 - DNA, 15 bp, synthetic construct
  source 1..15: mol_type = other DNA
atgtaattttgaaca

SEQ ID NO: 3784 - DNA, 15 bp, synthetic construct
  source 1..15: mol_type = other DNA
ccctgactactgtac

SEQ ID NO: 3785 - DNA, 15 bp, synthetic construct
  source 1..15: mol_type = other DNA
tgtctacagccgatg

SEQ ID NO: 3786 - DNA, 15 bp, synthetic construct
  source 1..15: mol_type = other DNA
gtcctggcaagtctg

SEQ ID NO: 3787 - DNA, 15 bp, synthetic construct
  source 1..15: mol_type = other DNA
gtttaagcccttaga

SEQ ID NO: 3788 - DNA, 15 bp, synthetic construct
  source 1..15: mol_type = other DNA
caggaactaacaatg

SEQ ID NO: 3789 - DNA, 15 bp, synthetic construct
  source 1..15: mol_type = other DNA
tcggaaatggttttt

SEQ ID NO: 3790 - DNA, 15 bp, synthetic construct
  source 1..15: mol_type = other DNA
aactttctcttctta

SEQ ID NO: 3791 - DNA, 15 bp, synthetic construct
  source 1..15: mol_type = other DNA
gaaaccggattccaa

SEQ ID NO: 3792 - DNA, 15 bp, synthetic construct
  source 1..15: mol_type = other DNA
atagcggtccttgta

SEQ ID NO: 3793 - DNA, 15 bp, synthetic construct
  source 1..15: mol_type = other DNA
gaaaccggattccaa

SEQ ID NO: 3794 - DNA, 15 bp, synthetic construct
  source 1..15: mol_type = other DNA
atagcggtccttgta

SEQ ID NO: 3795 - DNA, 15 bp, synthetic construct
  source 1..15: mol_type = other DNA
accagcttattttca

SEQ ID NO: 3796 - DNA, 15 bp, synthetic construct
  source 1..15: mol_type = other DNA
tttgcaaaacgccaa

SEQ ID NO: 3797 - DNA, 15 bp, synthetic construct
  source 1..15: mol_type = other DNA
cagtagcgctaagta

SEQ ID NO: 3798 - DNA, 15 bp, synthetic construct
  source 1..15: mol_type = other DNA
gcactcaaacttctt

SEQ ID NO: 3799 - DNA, 15 bp, synthetic construct
  source 1..15: mol_type = other DNA
atctacagaaatcga

SEQ ID NO: 3800 - DNA, 15 bp, synthetic construct
  source 1..15: mol_type = other DNA
ttaaaaccatgaggt

SEQ ID NO: 3801 - DNA, 15 bp, synthetic construct
  source 1..15: mol_type = other DNA
gttgaatttccatgc

SEQ ID NO: 3802 - DNA, 15 bp, synthetic construct
  source 1..15: mol_type = other DNA
agtcattgctagacg

SEQ ID NO: 3803 - DNA, 15 bp, synthetic construct
  source 1..15: mol_type = other DNA
tgccatggtgactga

SEQ ID NO: 3804 - DNA, 15 bp, synthetic construct
  source 1..15: mol_type = other DNA
gagagtctctaatca

SEQ ID NO: 3805 - DNA, 15 bp, synthetic construct
  source 1..15: mol_type = other DNA
acaggatccccactg

SEQ ID NO: 3806 - DNA, 15 bp, synthetic construct
  source 1..15: mol_type = other DNA
cttgccagtgctaag

SEQ ID NO: 3807 - DNA, 15 bp, synthetic construct
  source 1..15: mol_type = other DNA
acagtcttctttttt

SEQ ID NO: 3808 - DNA, 15 bp, synthetic construct
  source 1..15: mol_type = other DNA
ctaaaccttctagcg

SEQ ID NO: 3809 - DNA, 15 bp, synthetic construct
  source 1..15: mol_type = other DNA
actgattggcgtgaa

SEQ ID NO: 3810 - DNA, 15 bp, synthetic construct
  source 1..15: mol_type = other DNA
gaagcaatcttagaa

SEQ ID NO: 3811 - DNA, 15 bp, synthetic construct
  source 1..15: mol_type = other DNA
tcactgtctagatag

SEQ ID NO: 3812 - DNA, 15 bp, synthetic construct
  source 1..15: mol_type = other DNA
gcttcatcttttacc

SEQ ID NO: 3813 - DNA, 15 bp, synthetic construct
  source 1..15: mol_type = other DNA
tacaagacctccgat

SEQ ID NO: 3814 - DNA, 15 bp, synthetic construct
  source 1..15: mol_type = other DNA
aacagctcacactac

SEQ ID NO: 3815 - DNA, 15 bp, synthetic construct
  source 1..15: mol_type = other DNA
tgcagaggccatttc

SEQ ID NO: 3816 - DNA, 15 bp, synthetic construct
  source 1..15: mol_type = other DNA
gacaccgcacgtgag

SEQ ID NO: 3817 - DNA, 15 bp, synthetic construct
  source 1..15: mol_type = other DNA
tagaaaagcctgatg

SEQ ID NO: 3818 - DNA, 15 bp, synthetic construct
  source 1..15: mol_type = other DNA
aaacctacatgtcaa

SEQ ID NO: 3819 - DNA, 15 bp, synthetic construct
  source 1..15: mol_type = other DNA
gggccagaaatatca

SEQ ID NO: 3820 - DNA, 15 bp, synthetic construct
  source 1..15: mol_type = other DNA
gtctcctgaagaacc

SEQ ID NO: 3821 - DNA, 15 bp, synthetic construct
  source 1..15: mol_type = other DNA
actacccactgagca

SEQ ID NO: 3822 - DNA, 15 bp, synthetic construct
  source 1..15: mol_type = other DNA
acccatcttcaggta

SEQ ID NO: 3823 - DNA, 15 bp, synthetic construct
  source 1..15: mol_type = other DNA
ctacctcaagaagct

SEQ ID NO: 3824 - DNA, 15 bp, synthetic construct
  source 1..15: mol_type = other DNA
ttaagttacctgact

SEQ ID NO: 3825 - DNA, 15 bp, synthetic construct
  source 1..15: mol_type = other DNA
tgatgtccctaatgg

SEQ ID NO: 3826 - DNA, 15 bp, synthetic construct
  source 1..15: mol_type = other DNA
gtatgtcttggcagt

SEQ ID NO: 3827 - DNA, 15 bp, synthetic construct
  source 1..15: mol_type = other DNA
tgacttcctaaatag

SEQ ID NO: 3828 - DNA, 15 bp, synthetic construct
  source 1..15: mol_type = other DNA
gatgtttatcttggt

SEQ ID NO: 3829 - DNA, 15 bp, synthetic construct
  source 1..15: mol_type = other DNA
tttgacacgtttccc

SEQ ID NO: 3830 - DNA, 15 bp, synthetic construct
  source 1..15: mol_type = other DNA
gggttacattccatc

SEQ ID NO: 3831 - DNA, 15 bp, synthetic construct
  source 1..15: mol_type = other DNA
ttattggtgtctgcc

SEQ ID NO: 3832 - DNA, 15 bp, synthetic construct
  source 1..15: mol_type = other DNA
ggaaggaatttcttg

SEQ ID NO: 3833 - DNA, 15 bp, synthetic construct
  source 1..15: mol_type = other DNA
ctcacggtctttcct

SEQ ID NO: 3834 - DNA, 15 bp, synthetic construct
  source 1..15: mol_type = other DNA
acttttggaatctgg

SEQ ID NO: 3835 - DNA, 15 bp, synthetic construct
  source 1..15: mol_type = other DNA
tactcttcaccttgg

SEQ ID NO: 3836 - DNA, 15 bp, synthetic construct
  source 1..15: mol_type = other DNA
tctctcttcaaacgg

SEQ ID NO: 3837 - DNA, 15 bp, synthetic construct
  source 1..15: mol_type = other DNA
cctcgggagtccgtg

SEQ ID NO: 3838 - DNA, 15 bp, synthetic construct
  source 1..15: mol_type = other DNA
ggcccttgcccaacg

SEQ ID NO: 3839 - DNA, 15 bp, synthetic construct
  source 1..15: mol_type = other DNA
gcaactctgtggtca

SEQ ID NO: 3840 - DNA, 15 bp, synthetic construct
  source 1..15: mol_type = other DNA
gttgtttgcaatctc

SEQ ID NO: 3841 - DNA, 15 bp, synthetic construct
  source 1..15: mol_type = other DNA
tggttgagttctacc

SEQ ID NO: 3842 - DNA, 15 bp, synthetic construct
  source 1..15: mol_type = other DNA
aatctctctgggaac

SEQ ID NO: 3843 - DNA, 15 bp, synthetic construct
  source 1..15: mol_type = other DNA
ccatccttgaccaga

SEQ ID NO: 3844 - DNA, 15 bp, synthetic construct
  source 1..15: mol_type = other DNA
ttctggccaatcctc

SEQ ID NO: 3845 - DNA, 15 bp, synthetic construct
  source 1..15: mol_type = other DNA
cagatgtctcactgt

SEQ ID NO: 3846 - DNA, 15 bp, synthetic construct
  source 1..15: mol_type = other DNA
cacatgtgagctacc

SEQ ID NO: 3847 - DNA, 15 bp, synthetic construct
  source 1..15: mol_type = other DNA
cactcagaaaacaag

SEQ ID NO: 3848 - DNA, 15 bp, synthetic construct
  source 1..15: mol_type = other DNA
agcaactcatagtcc

SEQ ID NO: 3849 - DNA, 15 bp, synthetic construct
  source 1..15: mol_type = other DNA
tcttcccttagatgt

SEQ ID NO: 3850 - DNA, 15 bp, synthetic construct
  source 1..15: mol_type = other DNA
taggaattccgtggt

SEQ ID NO: 3851 - DNA, 15 bp, synthetic construct
  source 1..15: mol_type = other DNA
tagtaaaatttcgta

SEQ ID NO: 3852 - DNA, 15 bp, synthetic construct
  source 1..15: mol_type = other DNA
caaaagggcaatgga

SEQ ID NO: 3853 - DNA, 15 bp, synthetic construct
  source 1..15: mol_type = other DNA
ttgtccttgctgaag

SEQ ID NO: 3854 - DNA, 15 bp, synthetic construct
  source 1..15: mol_type = other DNA
gtatcccataaggtc

SEQ ID NO: 3855 - DNA, 15 bp, synthetic construct
  source 1..15: mol_type = other DNA
acaaagctacttcga

SEQ ID NO: 3856 - DNA, 15 bp, synthetic construct
  source 1..15: mol_type = other DNA
agaaacccagtgtgc

SEQ ID NO: 3857 - DNA, 15 bp, synthetic construct
  source 1..15: mol_type = other DNA
ggaagggaccttcat

SEQ ID NO: 3858 - DNA, 15 bp, synthetic construct
  source 1..15: mol_type = other DNA
cagaaatcttttggc

SEQ ID NO: 3859 - DNA, 15 bp, synthetic construct
  source 1..15: mol_type = other DNA
tggctataaagaaca

SEQ ID NO: 3860 - DNA, 15 bp, synthetic construct
  source 1..15: mol_type = other DNA
atgcttctgagattt

SEQ ID NO: 3861 - DNA, 15 bp, synthetic construct
  source 1..15: mol_type = other DNA
aacctgtccctcata

SEQ ID NO: 3862 - DNA, 15 bp, synthetic construct
  source 1..15: mol_type = other DNA
ataatctggcagctc

SEQ ID NO: 3863 - DNA, 15 bp, synthetic construct
  source 1..15: mol_type = other DNA
atgccaaagaagggt

SEQ ID NO: 3864 - DNA, 15 bp, synthetic construct
  source 1..15: mol_type = other DNA
caaactctagaaaat

SEQ ID NO: 3865 - DNA, 15 bp, synthetic construct
  source 1..15: mol_type = other DNA
acagcattgcatcaa

SEQ ID NO: 3866 - DNA, 15 bp, synthetic construct
  source 1..15: mol_type = other DNA
caaggattgcaccta

SEQ ID NO: 3867 - DNA, 15 bp, synthetic construct
  source 1..15: mol_type = other DNA
tatgatgctcttttc

SEQ ID NO: 3868 - DNA, 15 bp, synthetic construct
  source 1..15: mol_type = other DNA
cactatgaaaagagt

SEQ ID NO: 3869 - DNA, 15 bp, synthetic construct
  source 1..15: mol_type = other DNA
taaaatcaggtatta

SEQ ID NO: 3870 - DNA, 15 bp, synthetic construct
  source 1..15: mol_type = other DNA
ctttagagattcgag

SEQ ID NO: 3871 - DNA, 15 bp, synthetic construct
  source 1..15: mol_type = other DNA
cagtatatggatggt

SEQ ID NO: 3872 - DNA, 15 bp, synthetic construct
  source 1..15: mol_type = other DNA
agatcttgcagcatt

SEQ ID NO: 3873 - DNA, 15 bp, synthetic construct
  source 1..15: mol_type = other DNA
tctgtcatctgatta

SEQ ID NO: 3874 - DNA, 15 bp, synthetic construct
  source 1..15: mol_type = other DNA
cagaatacttcgatt

SEQ ID NO: 3875 - DNA, 15 bp, synthetic construct
  source 1..15: mol_type = other DNA
ttcataaagatcagc

SEQ ID NO: 3876 - DNA, 15 bp, synthetic construct
  source 1..15: mol_type = other DNA
ctactaataaattgt

SEQ ID NO: 3877 - DNA, 15 bp, synthetic construct
  source 1..15: mol_type = other DNA
atctctctttctggg

SEQ ID NO: 3878 - DNA, 15 bp, synthetic construct
  source 1..15: mol_type = other DNA
gacatttgcctgaag

SEQ ID NO: 3879 - DNA, 15 bp, synthetic construct
  source 1..15: mol_type = other DNA
cacaaaggtagtgtg

SEQ ID NO: 3880 - DNA, 15 bp, synthetic construct
  source 1..15: mol_type = other DNA
ttagatgtacagtga

SEQ ID NO: 3881 - DNA, 15 bp, synthetic construct
  source 1..15: mol_type = other DNA
tttattcctttggca

SEQ ID NO: 3882 - DNA, 15 bp, synthetic construct
  source 1..15: mol_type = other DNA
tgagtgaatcagaac

SEQ ID NO: 3883 - DNA, 15 bp, synthetic construct
  source 1..15: mol_type = other DNA
acattacctgcagat

SEQ ID NO: 3884 - DNA, 15 bp, synthetic construct
  source 1..15: mol_type = other DNA
ggccgttagttactt

SEQ ID NO: 3885 - DNA, 15 bp, synthetic construct
  source 1..15: mol_type = other DNA
caaactaacattcct

SEQ ID NO: 3886 - DNA, 15 bp, synthetic construct
  source 1..15: mol_type = other DNA
acagatgttggcaat

SEQ ID NO: 3887 - DNA, 15 bp, synthetic construct
  source 1..15: mol_type = other DNA
gtgtagtgatcagtt

SEQ ID NO: 3888 - DNA, 15 bp, synthetic construct
  source 1..15: mol_type = other DNA
atggctgggtagtaa

SEQ ID NO: 3889 - DNA, 15 bp, synthetic construct
  source 1..15: mol_type = other DNA
gtaaaagattgcatc

SEQ ID NO: 3890 - DNA, 15 bp, synthetic construct
  source 1..15: mol_type = other DNA
gttaattcctgtggt

SEQ ID NO: 3891 - DNA, 15 bp, synthetic construct
  source 1..15: mol_type = other DNA
gaactaaagttggca

SEQ ID NO: 3892 - DNA, 15 bp, synthetic construct
  source 1..15: mol_type = other DNA
gttttgaaatatttt

SEQ ID NO: 3893 - DNA, 15 bp, synthetic construct
  source 1..15: mol_type = other DNA
agctattactgaatt

SEQ ID NO: 3894 - DNA, 15 bp, synthetic construct
  source 1..15: mol_type = other DNA
tacttcagtttgtgt

SEQ ID NO: 3895 - DNA, 15 bp, synthetic construct
  source 1..15: mol_type = other DNA
tattagtcccaacaa

SEQ ID NO: 3896 - DNA, 15 bp, synthetic construct
  source 1..15: mol_type = other DNA
ggaactttatcggtt

SEQ ID NO: 3897 - DNA, 15 bp, synthetic construct
  source 1..15: mol_type = other DNA
cattttgttgaatag

SEQ ID NO: 3898 - DNA, 15 bp, synthetic construct
  source 1..15: mol_type = other DNA
ctcttcagtagtctc

SEQ ID NO: 3899 - DNA, 15 bp, synthetic construct
  source 1..15: mol_type = other DNA
tgttgcaataatact

SEQ ID NO: 3900 - DNA, 15 bp, synthetic construct
  source 1..15: mol_type = other DNA
tctttattttcttca

SEQ ID NO: 3901 - DNA, 15 bp, synthetic construct
  source 1..15: mol_type = other DNA
ctgtgttcaaaaaga

SEQ ID NO: 3902 - DNA, 15 bp, synthetic construct
  source 1..15: mol_type = other DNA
cttctgatattatgg

SEQ ID NO: 3903 - DNA, 15 bp, synthetic construct
  source 1..15: mol_type = other DNA
taagtgtgtttttca

SEQ ID NO: 3904 - DNA, 15 bp, synthetic construct
  source 1..15: mol_type = other DNA
actaactgcttgctg

SEQ ID NO: 3905 - DNA, 15 bp, synthetic construct
  source 1..15: mol_type = other DNA
ttggcaaactcaatt

SEQ ID NO: 3906 - DNA, 15 bp, synthetic construct
  source 1..15: mol_type = other DNA
taagagaatgtgcga

SEQ ID NO: 3907 - DNA, 15 bp, synthetic construct
  source 1..15: mol_type = other DNA
tcttacagtgaggta

SEQ ID NO: 3908 - DNA, 15 bp, synthetic construct
  source 1..15: mol_type = other DNA
cgtgctttttatttt

SEQ ID NO: 3909 - DNA, 15 bp, synthetic construct
  source 1..15: mol_type = other DNA
gttctttaagacata

SEQ ID NO: 3910 - DNA, 15 bp, synthetic construct
  source 1..15: mol_type = other DNA
gggatattgctgtag

SEQ ID NO: 3911 - DNA, 15 bp, synthetic construct
  source 1..15: mol_type = other DNA
gagaatgtgaaaaca

SEQ ID NO: 3912 - DNA, 15 bp, synthetic construct
  source 1..15: mol_type = other DNA
aagtcctaggataga

SEQ ID NO: 3913 - DNA, 15 bp, synthetic construct
  source 1..15: mol_type = other DNA
tcactaccactaggc

SEQ ID NO: 3914 - DNA, 15 bp, synthetic construct
  source 1..15: mol_type = other DNA
ttggctttcacaaga

SEQ ID NO: 3915 - DNA, 15 bp, synthetic construct
  source 1..15: mol_type = other DNA
taaagcaataaccta

SEQ ID NO: 3916 - DNA, 15 bp, synthetic construct
  source 1..15: mol_type = other DNA
aaatgaaattcagga

SEQ ID NO: 3917 - DNA, 15 bp, synthetic construct
  source 1..15: mol_type = other DNA
caggatcaaatactt

SEQ ID NO: 3918 - DNA, 15 bp, synthetic construct
  source 1..15: mol_type = other DNA
ggacattcaccctat

SEQ ID NO: 3919 - DNA, 15 bp, synthetic construct
  source 1..15: mol_type = other DNA
gtccaactcaaaaat

SEQ ID NO: 3920 - DNA, 15 bp, synthetic construct
  source 1..15: mol_type = other DNA
gaaagtgctttagaa

SEQ ID NO: 3921 - DNA, 15 bp, synthetic construct
  source 1..15: mol_type = other DNA
ttcaaatgttgctgc

SEQ ID NO: 3922 - DNA, 15 bp, synthetic construct
  source 1..15: mol_type = other DNA
aagttcctgataatt

SEQ ID NO: 3923 - DNA, 15 bp, synthetic construct
  source 1..15: mol_type = other DNA
aagccgcttggtttg

SEQ ID NO: 3924 - DNA, 15 bp, synthetic construct
  source 1..15: mol_type = other DNA
gtccactggctcgtc

SEQ ID NO: 3925 - DNA, 15 bp, synthetic construct
  source 1..15: mol_type = other DNA
cgaaagatctcgtac

SEQ ID NO: 3926 - DNA, 15 bp, synthetic construct
  source 1..15: mol_type = other DNA
gatcgaggacacgta

SEQ ID NO: 3927 - DNA, 15 bp, synthetic construct
  source 1..15: mol_type = other DNA
cggcggaacgagttg

SEQ ID NO: 3928 - DNA, 15 bp, synthetic construct
  source 1..15: mol_type = other DNA
tgctggtactcacta

SEQ ID NO: 3929 - DNA, 15 bp, synthetic construct
  source 1..15: mol_type = other DNA
ttcggtgtttccaac

SEQ ID NO: 3930 - DNA, 15 bp, synthetic construct
  source 1..15: mol_type = other DNA
gaagaaacacaatgg

SEQ ID NO: 3931 - DNA, 15 bp, synthetic construct
  source 1..15: mol_type = other DNA
ttctgctcctctttt

SEQ ID NO: 3932 - DNA, 15 bp, synthetic construct
  source 1..15: mol_type = other DNA
attctgccctggata

SEQ ID NO: 3933 - DNA, 15 bp, synthetic construct
  source 1..15: mol_type = other DNA
aatgaatgtttgtta

SEQ ID NO: 3934 - DNA, 15 bp, synthetic construct
  source 1..15: mol_type = other DNA
cccaccacaaagatg

SEQ ID NO: 3935 - DNA, 15 bp, synthetic construct
  source 1..15: mol_type = other DNA
cccaaagctggaagg

SEQ ID NO: 3936 - DNA, 15 bp, synthetic construct
  source 1..15: mol_type = other DNA
ttacataggtaattg

SEQ ID NO: 3937 - DNA, 15 bp, synthetic construct
  source 1..15: mol_type = other DNA
actttgccactatgg

SEQ ID NO: 3938 - DNA, 15 bp, synthetic construct
  source 1..15: mol_type = other DNA
tagctggcaaactgg

SEQ ID NO: 3939 - DNA, 15 bp, synthetic construct
  source 1..15: mol_type = other DNA
gcatcatcatttggc

SEQ ID NO: 3940 - DNA, 15 bp, synthetic construct
  source 1..15: mol_type = other DNA
ctgaatttcataagc

SEQ ID NO: 3941 - DNA, 15 bp, synthetic construct
  source 1..15: mol_type = other DNA
tttggaaggccctaa

SEQ ID NO: 3942 - DNA, 15 bp, synthetic construct
  source 1..15: mol_type = other DNA
attgttaaaataagc

SEQ ID NO: 3943 - DNA, 15 bp, synthetic construct
  source 1..15: mol_type = other DNA
atcaccatttgtata

SEQ ID NO: 3944 - DNA, 15 bp, synthetic construct
  source 1..15: mol_type = other DNA
tatggacaggtttcg

SEQ ID NO: 3945 - DNA, 15 bp, synthetic construct
  source 1..15: mol_type = other DNA
tcaaaaagcagggtt

SEQ ID NO: 3946 - DNA, 15 bp, synthetic construct
  source 1..15: mol_type = other DNA
tcaaagtctgtgttt

SEQ ID NO: 3947 - DNA, 15 bp, synthetic construct
  source 1..15: mol_type = other DNA
ttgagttagcagttt

SEQ ID NO: 3948 - DNA, 15 bp, synthetic construct
  source 1..15: mol_type = other DNA
tgagttatgtgagca

SEQ ID NO: 3949 - DNA, 15 bp, synthetic construct
  source 1..15: mol_type = other DNA
gcttaccgcaatgta

SEQ ID NO: 3950 - DNA, 15 bp, synthetic construct
  source 1..15: mol_type = other DNA
agccaaatgatctca

SEQ ID NO: 3951 - DNA, 15 bp, synthetic construct
  source 1..15: mol_type = other DNA
ttaacctggaccaca

SEQ ID NO: 3952 - DNA, 15 bp, synthetic construct
  source 1..15: mol_type = other DNA
aaaaatgatttaagt

SEQ ID NO: 3953 - DNA, 15 bp, synthetic construct
  source 1..15: mol_type = other DNA
tttctggactaagga

SEQ ID NO: 3954 - DNA, 15 bp, synthetic construct
  source 1..15: mol_type = other DNA
tatagaaacaactaa

SEQ ID NO: 3955 - DNA, 15 bp, synthetic construct
  source 1..15: mol_type = other DNA
ttaagagttagtggg

SEQ ID NO: 3956 - DNA, 15 bp, synthetic construct
  source 1..15: mol_type = other DNA
tgagttgtttcaacc

SEQ ID NO: 3957 - DNA, 15 bp, synthetic construct
  source 1..15: mol_type = other DNA
gaaaaaccatccaca

SEQ ID NO: 3958 - DNA, 15 bp, synthetic construct
  source 1..15: mol_type = other DNA
aggtagatccaaagt

SEQ ID NO: 3959 - DNA, 15 bp, synthetic construct
  source 1..15: mol_type = other DNA
gtggaggaagtacag

SEQ ID NO: 3960 - DNA, 15 bp, synthetic construct
  source 1..15: mol_type = other DNA
tcctggttgcacttt

SEQ ID NO: 3961 - DNA, 15 bp, synthetic construct
  source 1..15: mol_type = other DNA
gttactttcagacaa

SEQ ID NO: 3962 - DNA, 15 bp, synthetic construct
  source 1..15: mol_type = other DNA
gcgaataattttagc

SEQ ID NO: 3963 - DNA, 15 bp, synthetic construct
  source 1..15: mol_type = other DNA
atatgcctcataggg

SEQ ID NO: 3964 - DNA, 15 bp, synthetic construct
  source 1..15: mol_type = other DNA
ctaatcaccatgctc

SEQ ID NO: 3965 - DNA, 15 bp, synthetic construct
  source 1..15: mol_type = other DNA
ctaccttccaagtgt

SEQ ID NO: 3966 - DNA, 15 bp, synthetic construct
  source 1..15: mol_type = other DNA
catgttttgggtgtt

SEQ ID NO: 3967 - DNA, 15 bp, synthetic construct
  source 1..15: mol_type = other DNA
agtatgagattgtgg

SEQ ID NO: 3968 - DNA, 15 bp, synthetic construct
  source 1..15: mol_type = other DNA
acaaatctatccatg

SEQ ID NO: 3969 - DNA, 15 bp, synthetic construct
  source 1..15: mol_type = other DNA
tgtgtatgaggaaca

SEQ ID NO: 3970 - DNA, 15 bp, synthetic construct
  source 1..15: mol_type = other DNA
aagaagtttaagctg

SEQ ID NO: 3971 - DNA, 15 bp, synthetic construct
  source 1..15: mol_type = other DNA
cttgactgtattccc

SEQ ID NO: 3972 - DNA, 15 bp, synthetic construct
  source 1..15: mol_type = other DNA
tagacttggactctc

SEQ ID NO: 3973 - DNA, 15 bp, synthetic construct
  source 1..15: mol_type = other DNA
ctagcaccatcctag

SEQ ID NO: 3974 - DNA, 15 bp, synthetic construct
  source 1..15: mol_type = other DNA
tctgggtccagacat

SEQ ID NO: 3975 - DNA, 15 bp, synthetic construct
  source 1..15: mol_type = other DNA
atgactttttggaag

SEQ ID NO: 3976 - DNA, 15 bp, synthetic construct
  source 1..15: mol_type = other DNA
accaaccttgtcctg

SEQ ID NO: 3977 - DNA, 15 bp, synthetic construct
  source 1..15: mol_type = other DNA
gtccaaacttgtagg

SEQ ID NO: 3978 - DNA, 15 bp, synthetic construct
  source 1..15: mol_type = other DNA
cctaaacctcatagt

SEQ ID NO: 3979 - DNA, 15 bp, synthetic construct
  source 1..15: mol_type = other DNA
catgatgattgaaca

SEQ ID NO: 3980 - DNA, 15 bp, synthetic construct
  source 1..15: mol_type = other DNA
gaatcctgtgagaag

SEQ ID NO: 3981 - DNA, 15 bp, synthetic construct
  source 1..15: mol_type = other DNA
catgatgattgaaca

SEQ ID NO: 3982 - DNA, 15 bp, synthetic construct
  source 1..15: mol_type = other DNA
gaatcctgtgagaag

SEQ ID NO: 3983 - DNA, 15 bp, synthetic construct
  source 1..15: mol_type = other DNA
tatccagcctagacc

SEQ ID NO: 3984 - DNA, 15 bp, synthetic construct
  source 1..15: mol_type = other DNA
ccctataacctcaac

SEQ ID NO: 3985 - DNA, 15 bp, synthetic construct
  source 1..15: mol_type = other DNA
cgtggtctcagcatt

SEQ ID NO: 3986 - DNA, 15 bp, synthetic construct
  source 1..15: mol_type = other DNA
caaaagatgacattg

SEQ ID NO: 3987 - DNA, 15 bp, synthetic construct
  source 1..15: mol_type = other DNA
aatggatctcagtag

SEQ ID NO: 3988 - DNA, 15 bp, synthetic construct
  source 1..15: mol_type = other DNA
tcattgtgtagactg

SEQ ID NO: 3989 - DNA, 15 bp, synthetic construct
  source 1..15: mol_type = other DNA
acacaatgacattta

SEQ ID NO: 3990 - DNA, 15 bp, synthetic construct
  source 1..15: mol_type = other DNA
tccagagtccatgat

SEQ ID NO: 3991 - DNA, 15 bp, synthetic construct
  source 1..15: mol_type = other DNA
tcagatagtggagag

SEQ ID NO: 3992 - DNA, 15 bp, synthetic construct
  source 1..15: mol_type = other DNA
agtgtgagagaagga

SEQ ID NO: 3993 - DNA, 15 bp, synthetic construct
  source 1..15: mol_type = other DNA
ccaaggagactggtc

SEQ ID NO: 3994 - DNA, 15 bp, synthetic construct
  source 1..15: mol_type = other DNA
tgaccacaaaccaag

SEQ ID NO: 3995 - DNA, 15 bp, synthetic construct
  source 1..15: mol_type = other DNA
ccagcttcgtaggct

SEQ ID NO: 3996 - DNA, 15 bp, synthetic construct
  source 1..15: mol_type = other DNA
gtgttcgagctcaca

SEQ ID NO: 3997 - DNA, 15 bp, synthetic construct
  source 1..15: mol_type = other DNA
gcgatcatgacaggc

SEQ ID NO: 3998 - DNA, 15 bp, synthetic construct
  source 1..15: mol_type = other DNA
cccaggactgtattg

SEQ ID NO: 3999 - DNA, 15 bp, synthetic construct
  source 1..15: mol_type = other DNA
ctgggattggacctg

SEQ ID NO: 4000 - DNA, 15 bp, synthetic construct
  source 1..15: mol_type = other DNA
agatggaattcatac

SEQ ID NO: 4001 - DNA, 15 bp, synthetic construct
  source 1..15: mol_type = other DNA
cgaccacagcgtagc

SEQ ID NO: 4002 - DNA, 15 bp, synthetic construct
  source 1..15: mol_type = other DNA
gaatgacccgttggc

SEQ ID NO: 4003 - DNA, 15 bp, synthetic construct
  source 1..15: mol_type = other DNA
cgggtcattcagtgt

SEQ ID NO: 4004 - DNA, 15 bp, synthetic construct
  source 1..15: mol_type = other DNA
tcttcgcctttgaac

SEQ ID NO: 4005 - DNA, 15 bp, synthetic construct
  source 1..15: mol_type = other DNA
ggcaagctatgtaaa

SEQ ID NO: 4006 - DNA, 15 bp, synthetic construct
  source 1..15: mol_type = other DNA
ttcatcctgtcggtt

SEQ ID NO: 4007 - DNA, 15 bp, synthetic construct
  source 1..15: mol_type = other DNA
cttccaagggaaagc

SEQ ID NO: 4008 - DNA, 15 bp, synthetic construct
  source 1..15: mol_type = other DNA
caggactgagtgttt

SEQ ID NO: 4009 - DNA, 15 bp, synthetic construct
  source 1..15: mol_type = other DNA
agtgcctgttttgac

SEQ ID NO: 4010 - DNA, 15 bp, synthetic construct
  source 1..15: mol_type = other DNA
aaggctccttttcac

SEQ ID NO: 4011 - DNA, 15 bp, synthetic construct
  source 1..15: mol_type = other DNA
caatcttccggttca

SEQ ID NO: 4012 - DNA, 15 bp, synthetic construct
  source 1..15: mol_type = other DNA
tccctttagagacta

SEQ ID NO: 4013 - DNA, 15 bp, synthetic construct
  source 1..15: mol_type = other DNA
caatcttccggttca

SEQ ID NO: 4014 - DNA, 15 bp, synthetic construct
  source 1..15: mol_type = other DNA
tccctttagagacta

SEQ ID NO: 4015 - DNA, 15 bp, synthetic construct
  source 1..15: mol_type = other DNA
gtcgagccggaatcg

SEQ ID NO: 4016 - DNA, 15 bp, synthetic construct
  source 1..15: mol_type = other DNA
cagcatcgaggtcac

SEQ ID NO: 4017 - DNA, 15 bp, synthetic construct
  source 1..15: mol_type = other DNA
gtcgagccggaatcg

SEQ ID NO: 4018 - DNA, 15 bp, synthetic construct
  source 1..15: mol_type = other DNA
cagcatcgaggtcac

SEQ ID NO: 4019 - DNA, 15 bp, synthetic construct
  source 1..15: mol_type = other DNA
gttccgcactgcaaa

SEQ ID NO: 4020 - DNA, 15 bp, synthetic construct
  source 1..15: mol_type = other DNA
tcccggaacacagag

SEQ ID NO: 4021 - DNA, 15 bp, synthetic construct
  source 1..15: mol_type = other DNA
gttccgcactgcaaa

SEQ ID NO: 4022 - DNA, 15 bp, synthetic construct
  source 1..15: mol_type = other DNA
tcccggaacacagag

SEQ ID NO: 4023 - DNA, 15 bp, synthetic construct
  source 1..15: mol_type = other DNA
gcctacctccaatag

SEQ ID NO: 4024 - DNA, 15 bp, synthetic construct
  source 1..15: mol_type = other DNA
catatcgcaagcatg

SEQ ID NO: 4025 - DNA, 15 bp, synthetic construct
  source 1..15: mol_type = other DNA
gcctacctccaatag

SEQ ID NO: 4026 - DNA, 15 bp, synthetic construct
  source 1..15: mol_type = other DNA
catatcgcaagcatg

SEQ ID NO: 4027 - DNA, 15 bp, synthetic construct
  source 1..15: mol_type = other DNA
cttacctcatagata

SEQ ID NO: 4028 - DNA, 15 bp, synthetic construct
  source 1..15: mol_type = other DNA
cctttatagctaagg

SEQ ID NO: 4029 - DNA, 15 bp, synthetic construct
  source 1..15: mol_type = other DNA
cttacctcatagata

SEQ ID NO: 4030 - DNA, 15 bp, synthetic construct
  source 1..15: mol_type = other DNA
cctttatagctaagg

SEQ ID NO: 4031 - DNA, 15 bp, synthetic construct
  source 1..15: mol_type = other DNA
ggactccttcattcc

SEQ ID NO: 4032 - DNA, 15 bp, synthetic construct
  source 1..15: mol_type = other DNA
tgtcggtatgttaga

SEQ ID NO: 4033 - DNA, 15 bp, synthetic construct
  source 1..15: mol_type = other DNA
cgatgcacccatttc

SEQ ID NO: 4034 - DNA, 15 bp, synthetic construct
  source 1..15: mol_type = other DNA
ctgtcgtatcagcgt

SEQ ID NO: 4035 - DNA, 15 bp, synthetic construct
  source 1..15: mol_type = other DNA
ccatgtctagacgag

SEQ ID NO: 4036 - DNA, 15 bp, synthetic construct
  source 1..15: mol_type = other DNA
caagttcctagtatc

SEQ ID NO: 4037 - DNA, 15 bp, synthetic construct
  source 1..15: mol_type = other DNA
ggcatagtccatgac

SEQ ID NO: 4038 - DNA, 15 bp, synthetic construct
  source 1..15: mol_type = other DNA
attagagctgctgat

SEQ ID NO: 4039 - DNA, 15 bp, synthetic construct
  source 1..15: mol_type = other DNA
ccccctcaactgtcc

SEQ ID NO: 4040 - DNA, 15 bp, synthetic construct
  source 1..15: mol_type = other DNA
tggccggtacactca

SEQ ID NO: 4041 - DNA, 15 bp, synthetic construct
  source 1..15: mol_type = other DNA
ctccgtccatattcc

SEQ ID NO: 4042 - DNA, 15 bp, synthetic construct
  source 1..15: mol_type = other DNA
gcgttcaagagggat

SEQ ID NO: 4043 - DNA, 15 bp, synthetic construct
  source 1..15: mol_type = other DNA
ggtcctcgcgcttcc

SEQ ID NO: 4044 - DNA, 15 bp, synthetic construct
  source 1..15: mol_type = other DNA
cgcactctgctctcg

SEQ ID NO: 4045 - DNA, 15 bp, synthetic construct
  source 1..15: mol_type = other DNA
gctagcatgtgaggc

SEQ ID NO: 4046 - DNA, 15 bp, synthetic construct
  source 1..15: mol_type = other DNA
atggatatggatggc

SEQ ID NO: 4047 - DNA, 15 bp, synthetic construct
  source 1..15: mol_type = other DNA
agaactgtgggcaac

SEQ ID NO: 4048 - DNA, 15 bp, synthetic construct
  source 1..15: mol_type = other DNA
aattcctatcacggt

SEQ ID NO: 4049 - DNA, 15 bp, synthetic construct
  source 1..15: mol_type = other DNA
tggctaatggtacgt

SEQ ID NO: 4050 - DNA, 15 bp, synthetic construct
  source 1..15: mol_type = other DNA
ggaaatctagaaagg

SEQ ID NO: 4051 - DNA, 15 bp, synthetic construct
  source 1..15: mol_type = other DNA
attacccctttttcg

SEQ ID NO: 4052 - DNA, 15 bp, synthetic construct
  source 1..15: mol_type = other DNA
agtcgttgtaggcaa

SEQ ID NO: 4053 - DNA, 15 bp, synthetic construct
  source 1..15: mol_type = other DNA
cttctaacaagaaat

SEQ ID NO: 4054 - DNA, 15 bp, synthetic construct
  source 1..15: mol_type = other DNA
tgatgagattgcttc

SEQ ID NO: 4055 - DNA, 15 bp, synthetic construct
  source 1..15: mol_type = other DNA
tgggaataacctcta

SEQ ID NO: 4056 - DNA, 15 bp, synthetic construct
  source 1..15: mol_type = other DNA
ccaggttaacttcat

SEQ ID NO: 4057 - DNA, 15 bp, synthetic construct
  source 1..15: mol_type = other DNA
aatctacaccaccaa

SEQ ID NO: 4058 - DNA, 15 bp, synthetic construct
  source 1..15: mol_type = other DNA
ctttttctcctttga

SEQ ID NO: 4059 - DNA, 15 bp, synthetic construct
  source 1..15: mol_type = other DNA
tcttacgtgaaacct

SEQ ID NO: 4060 - DNA, 15 bp, synthetic construct
  source 1..15: mol_type = other DNA
agctgtttctatatc

SEQ ID NO: 4061 - DNA, 15 bp, synthetic construct
  source 1..15: mol_type = other DNA
attgcagggctctag

SEQ ID NO: 4062 - DNA, 15 bp, synthetic construct
  source 1..15: mol_type = other DNA
ttcagatcaacctct

SEQ ID NO: 4063 - DNA, 15 bp, synthetic construct
  source 1..15: mol_type = other DNA
cctcactaaaaatgc

SEQ ID NO: 4064 - DNA, 15 bp, synthetic construct
  source 1..15: mol_type = other DNA
gcaaagatatcagag

SEQ ID NO: 4065 - DNA, 15 bp, synthetic construct
  source 1..15: mol_type = other DNA
cttatttaaatgaac

SEQ ID NO: 4066 - DNA, 15 bp, synthetic construct
  source 1..15: mol_type = other DNA
ctttcctactagaga

SEQ ID NO: 4067 - DNA, 15 bp, synthetic construct
  source 1..15: mol_type = other DNA
agtaggtggtcaagc

SEQ ID NO: 4068 - DNA, 15 bp, synthetic construct
  source 1..15: mol_type = other DNA
ttaactctgaacata

SEQ ID NO: 4069 - DNA, 15 bp, synthetic construct
  source 1..15: mol_type = other DNA
actatatagagcctt

SEQ ID NO: 4070 - DNA, 15 bp, synthetic construct
  source 1..15: mol_type = other DNA
gtatttctcaactct

SEQ ID NO: 4071 - DNA, 15 bp, synthetic construct
  source 1..15: mol_type = other DNA
ccaacaagcacagct

SEQ ID NO: 4072 - DNA, 15 bp, synthetic construct
  source 1..15: mol_type = other DNA
aacactctgaatggt

SEQ ID NO: 4073 - DNA, 15 bp, synthetic construct
  source 1..15: mol_type = other DNA
ggcatgtaccagttg

SEQ ID NO: 4074 - DNA, 15 bp, synthetic construct
  source 1..15: mol_type = other DNA
acatggccgagtata

SEQ ID NO: 4075 - DNA, 15 bp, synthetic construct
  source 1..15: mol_type = other DNA
cggaggcggattagc

SEQ ID NO: 4076 - DNA, 15 bp, synthetic construct
  source 1..15: mol_type = other DNA
taataaagggaaagc

SEQ ID NO: 4077 - DNA, 15 bp, synthetic construct
  source 1..15: mol_type = other DNA
ccggctttatatcta

SEQ ID NO: 4078 - DNA, 15 bp, synthetic construct
  source 1..15: mol_type = other DNA
tgactaaacaaggag

SEQ ID NO: 4079 - DNA, 15 bp, synthetic construct
  source 1..15: mol_type = other DNA
atatacctgcatggt

SEQ ID NO: 4080 - DNA, 15 bp, synthetic construct
  source 1..15: mol_type = other DNA
gaaaatcccagatat

SEQ ID NO: 4081 - DNA, 15 bp, synthetic construct
  source 1..15: mol_type = other DNA
acaaatgaattcctc

SEQ ID NO: 4082 - DNA, 15 bp, synthetic construct
  source 1..15: mol_type = other DNA
agcaaggatcttttg

SEQ ID NO: 4083 - DNA, 15 bp, synthetic construct
  source 1..15: mol_type = other DNA
ttagtccctttccat

SEQ ID NO: 4084 - DNA, 15 bp, synthetic construct
  source 1..15: mol_type = other DNA
ggtttaacagagcta

SEQ ID NO: 4085 - DNA, 15 bp, synthetic construct
  source 1..15: mol_type = other DNA
tgagttctgttatct

SEQ ID NO: 4086 - DNA, 15 bp, synthetic construct
  source 1..15: mol_type = other DNA
attgggtgaccgaga

SEQ ID NO: 4087 - DNA, 15 bp, synthetic construct
  source 1..15: mol_type = other DNA
agcggctaatattgg

SEQ ID NO: 4088 - DNA, 15 bp, synthetic construct
  source 1..15: mol_type = other DNA
aggacacgtcgaaac

SEQ ID NO: 4089 - DNA, 15 bp, synthetic construct
  source 1..15: mol_type = other DNA
tctctctccatcacc

SEQ ID NO: 4090 - DNA, 15 bp, synthetic construct
  source 1..15: mol_type = other DNA
tctctggttcagtat

SEQ ID NO: 4091 - DNA, 15 bp, synthetic construct
  source 1..15: mol_type = other DNA
tatctcctgttggtt

SEQ ID NO: 4092 - DNA, 15 bp, synthetic construct
  source 1..15: mol_type = other DNA
tctgcttaccctcgt

SEQ ID NO: 4093 - DNA, 15 bp, synthetic construct
  source 1..15: mol_type = other DNA
agtattccactgaac

SEQ ID NO: 4094 - DNA, 15 bp, synthetic construct
  source 1..15: mol_type = other DNA
aatgcccacagaatc

SEQ ID NO: 4095 - DNA, 15 bp, synthetic construct
  source 1..15: mol_type = other DNA
tgcaatttcatttta

SEQ ID NO: 4096 - DNA, 15 bp, synthetic construct
  source 1..15: mol_type = other DNA
tgttctctcaagtct

SEQ ID NO: 4097 - DNA, 15 bp, synthetic construct
  source 1..15: mol_type = other DNA
aggaacaacgtcagt

SEQ ID NO: 4098 - DNA, 15 bp, synthetic construct
  source 1..15: mol_type = other DNA
ttaatgataaagcag

SEQ ID NO: 4099 - DNA, 15 bp, synthetic construct
  source 1..15: mol_type = other DNA
tggaagtggtagatc

SEQ ID NO: 4100 - DNA, 15 bp, synthetic construct
  source 1..15: mol_type = other DNA
agattcaaccctacc

SEQ ID NO: 4101 - DNA, 15 bp, synthetic construct
  source 1..15: mol_type = other DNA
ctactgtctttttaa

SEQ ID NO: 4102 - DNA, 15 bp, synthetic construct
  source 1..15: mol_type = other DNA
ggttaaaatgaagca

SEQ ID NO: 4103 - DNA, 15 bp, synthetic construct
  source 1..15: mol_type = other DNA
ctaacagttctacag

SEQ ID NO: 4104 - DNA, 15 bp, synthetic construct
  source 1..15: mol_type = other DNA
gatccaaataaagtc

SEQ ID NO: 4105 - DNA, 15 bp, synthetic construct
  source 1..15: mol_type = other DNA
ggagtgtgtttctga

SEQ ID NO: 4106 - DNA, 15 bp, synthetic construct
  source 1..15: mol_type = other DNA
acatggaaatacaac

SEQ ID NO: 4107 - DNA, 15 bp, synthetic construct
  source 1..15: mol_type = other DNA
acagagacctgttga

SEQ ID NO: 4108 - DNA, 15 bp, synthetic construct
  source 1..15: mol_type = other DNA
aggagatgctcttac

SEQ ID NO: 4109 - DNA, 15 bp, synthetic construct
  source 1..15: mol_type = other DNA
cctaggacctcaata

SEQ ID NO: 4110 - DNA, 15 bp, synthetic construct
  source 1..15: mol_type = other DNA
gcttaagaacatgcc

SEQ ID NO: 4111 - DNA, 15 bp, synthetic construct
  source 1..15: mol_type = other DNA
attaaaaaggaaggc

SEQ ID NO: 4112 - DNA, 15 bp, synthetic construct
  source 1..15: mol_type = other DNA
caatctgtgggatac

SEQ ID NO: 4113 - DNA, 15 bp, synthetic construct
  source 1..15: mol_type = other DNA
tcagttcccatgatg

SEQ ID NO: 4114 - DNA, 15 bp, synthetic construct
  source 1..15: mol_type = other DNA
ttccaactgttttat

SEQ ID NO: 4115 - DNA, 15 bp, synthetic construct
  source 1..15: mol_type = other DNA
tatattgggttttcc

SEQ ID NO: 4116 - DNA, 15 bp, synthetic construct
  source 1..15: mol_type = other DNA
ctacaaggcggttgt

SEQ ID NO: 4117 - DNA, 15 bp, synthetic construct
  source 1..15: mol_type = other DNA
ggaatgataggatgc

SEQ ID NO: 4118 - DNA, 15 bp, synthetic construct
  source 1..15: mol_type = other DNA
agcatcaataacacg

SEQ ID NO: 4119 - DNA, 15 bp, synthetic construct
  source 1..15: mol_type = other DNA
cctgagcaatttcga

SEQ ID NO: 4120 - DNA, 15 bp, synthetic construct
  source 1..15: mol_type = other DNA
cgctgttgcttattg

SEQ ID NO: 4121 - DNA, 15 bp, synthetic construct
  source 1..15: mol_type = other DNA
ggaatgacttcaact

SEQ ID NO: 4122 - DNA, 15 bp, synthetic construct
  source 1..15: mol_type = other DNA
aatcagaattagatg

SEQ ID NO: 4123 - DNA, 15 bp, synthetic construct
  source 1..15: mol_type = other DNA
tgggtcagaaaacgt

SEQ ID NO: 4124 - DNA, 15 bp, synthetic construct
  source 1..15: mol_type = other DNA
gtgtttctggtacct

SEQ ID NO: 4125 - DNA, 15 bp, synthetic construct
  source 1..15: mol_type = other DNA
aactcaagacacctg

SEQ ID NO: 4126 - DNA, 15 bp, synthetic construct
  source 1..15: mol_type = other DNA
gcattcaccatccaa

SEQ ID NO: 4127 - DNA, 15 bp, synthetic construct
  source 1..15: mol_type = other DNA
atgagggatcttctt

SEQ ID NO: 4128 - DNA, 15 bp, synthetic construct
  source 1..15: mol_type = other DNA
ttgtacatggcagtt

SEQ ID NO: 4129 - DNA, 15 bp, synthetic construct
  source 1..15: mol_type = other DNA
ttctctttttgatca

SEQ ID NO: 4130 - DNA, 15 bp, synthetic construct
  source 1..15: mol_type = other DNA
caaaatggaaacctg

SEQ ID NO: 4131 - DNA, 15 bp, synthetic construct
  source 1..15: mol_type = other DNA
ttacctacttgtctg

SEQ ID NO: 4132 - DNA, 15 bp, synthetic construct
  source 1..15: mol_type = other DNA
attagtaacgtggct

SEQ ID NO: 4133 - DNA, 15 bp, synthetic construct
  source 1..15: mol_type = other DNA
actgcagatattcta

SEQ ID NO: 4134 - DNA, 15 bp, synthetic construct
  source 1..15: mol_type = other DNA
tagaaagggaagcca

SEQ ID NO: 4135 - DNA, 15 bp, synthetic construct
  source 1..15: mol_type = other DNA
atttgtagcatcctc

SEQ ID NO: 4136 - DNA, 15 bp, synthetic construct
  source 1..15: mol_type = other DNA
ttgctattttatttt

SEQ ID NO: 4137 - DNA, 15 bp, synthetic construct
  source 1..15: mol_type = other DNA
cactgagttctactt

SEQ ID NO: 4138 - DNA, 15 bp, synthetic construct
  source 1..15: mol_type = other DNA
gcaaacacaccctga

SEQ ID NO: 4139 - DNA, 15 bp, synthetic construct
  source 1..15: mol_type = other DNA
aatggaattgtggaa

SEQ ID NO: 4140 - DNA, 15 bp, synthetic construct
  source 1..15: mol_type = other DNA
taactttttcaaaga

SEQ ID NO: 4141 - DNA, 15 bp, synthetic construct
  source 1..15: mol_type = other DNA
tcaaaatccacctga

SEQ ID NO: 4142 - DNA, 15 bp, synthetic construct
  source 1..15: mol_type = other DNA
atctctcctttgcca

SEQ ID NO: 4143 - DNA, 15 bp, synthetic construct
  source 1..15: mol_type = other DNA
taaataaattaccct

SEQ ID NO: 4144 - DNA, 15 bp, synthetic construct
  source 1..15: mol_type = other DNA
ctgtaggaaaagtac

SEQ ID NO: 4145 - DNA, 15 bp, synthetic construct
  source 1..15: mol_type = other DNA
ctttcctaagccatg

SEQ ID NO: 4146 - DNA, 15 bp, synthetic construct
  source 1..15: mol_type = other DNA
gaaaaagatatccag

SEQ ID NO: 4147 - DNA, 15 bp, synthetic construct
  source 1..15: mol_type = other DNA
tacttctcgtacaga

SEQ ID NO: 4148 - DNA, 15 bp, synthetic construct
  source 1..15: mol_type = other DNA
tttacaaaacgatgt

SEQ ID NO: 4149 - DNA, 15 bp, synthetic construct
  source 1..15: mol_type = other DNA
acacacagtgacagg

SEQ ID NO: 4150 - DNA, 15 bp, synthetic construct
  source 1..15: mol_type = other DNA
ttttgttcgctggtg

SEQ ID NO: 4151 - DNA, 15 bp, synthetic construct
  source 1..15: mol_type = other DNA
ttcttctagaaggtt

SEQ ID NO: 4152 - DNA, 15 bp, synthetic construct
  source 1..15: mol_type = other DNA
aagtacctctttcca

SEQ ID NO: 4153 - DNA, 15 bp, synthetic construct
  source 1..15: mol_type = other DNA
tgacggttaaaagta

SEQ ID NO: 4154 - DNA, 15 bp, synthetic construct
  source 1..15: mol_type = other DNA
aagtgaactgcacaa

SEQ ID NO: 4155 - DNA, 15 bp, synthetic construct
  source 1..15: mol_type = other DNA
cagaatccctccacc

SEQ ID NO: 4156 - DNA, 15 bp, synthetic construct
  source 1..15: mol_type = other DNA
tcatgacactgtttt

SEQ ID NO: 4157 - DNA, 15 bp, synthetic construct
  source 1..15: mol_type = other DNA
acctccttatgccag

SEQ ID NO: 4158 - DNA, 15 bp, synthetic construct
  source 1..15: mol_type = other DNA
atggtcttggaactg

SEQ ID NO: 4159 - DNA, 15 bp, synthetic construct
  source 1..15: mol_type = other DNA
ctccattttattttc

SEQ ID NO: 4160 - DNA, 15 bp, synthetic construct
  source 1..15: mol_type = other DNA
actgcacactgtggt

SEQ ID NO: 4161 - DNA, 15 bp, synthetic construct
  source 1..15: mol_type = other DNA
accatggcaagaact

SEQ ID NO: 4162 - DNA, 15 bp, synthetic construct
  source 1..15: mol_type = other DNA
agatatgtttggttt

SEQ ID NO: 4163 - DNA, 15 bp, synthetic construct
  source 1..15: mol_type = other DNA
tcacattcaagtggt

SEQ ID NO: 4164 - DNA, 15 bp, synthetic construct
  source 1..15: mol_type = other DNA
tctagagcccttttt

SEQ ID NO: 4165 - DNA, 15 bp, synthetic construct
  source 1..15: mol_type = other DNA
gaagttcagtccctg

SEQ ID NO: 4166 - DNA, 15 bp, synthetic construct
  source 1..15: mol_type = other DNA
ttgtatgcagtgcag

SEQ ID NO: 4167 - DNA, 15 bp, synthetic construct
  source 1..15: mol_type = other DNA
agagagaatcaataa

SEQ ID NO: 4168 - DNA, 15 bp, synthetic construct
  source 1..15: mol_type = other DNA
tcgttttgaagctaa

SEQ ID NO: 4169 - DNA, 15 bp, synthetic construct
  source 1..15: mol_type = other DNA
catagagggatcgct

SEQ ID NO: 4170 - DNA, 15 bp, synthetic construct
  source 1..15: mol_type = other DNA
aaatctttcgcatat

SEQ ID NO: 4171 - DNA, 15 bp, synthetic construct
  source 1..15: mol_type = other DNA
gaactaggttcagac

SEQ ID NO: 4172 - DNA, 15 bp, synthetic construct
  source 1..15: mol_type = other DNA
agagctgctagtcat

SEQ ID NO: 4173 - DNA, 15 bp, synthetic construct
  source 1..15: mol_type = other DNA
ggtcgatattgtgca

SEQ ID NO: 4174 - DNA, 15 bp, synthetic construct
  source 1..15: mol_type = other DNA
tctcccaaattaaga

SEQ ID NO: 4175 - DNA, 15 bp, synthetic construct
  source 1..15: mol_type = other DNA
aacaaaaacgtgatc

SEQ ID NO: 4176 - DNA, 15 bp, synthetic construct
  source 1..15: mol_type = other DNA
atagaatgtcaggtt

SEQ ID NO: 4177 - DNA, 15 bp, synthetic construct
  source 1..15: mol_type = other DNA
tcttacatggctgat

SEQ ID NO: 4178 - DNA, 15 bp, synthetic construct
  source 1..15: mol_type = other DNA
gaatactgattggct

SEQ ID NO: 4179 - DNA, 15 bp, synthetic construct
  source 1..15: mol_type = other DNA
ggcatcacaactgaa

SEQ ID NO: 4180 - DNA, 15 bp, synthetic construct
  source 1..15: mol_type = other DNA
tcagagaacaagtga

SEQ ID NO: 4181 - DNA, 15 bp, synthetic construct
  source 1..15: mol_type = other DNA
cagtatctatcagaa

SEQ ID NO: 4182 - DNA, 15 bp, synthetic construct
  source 1..15: mol_type = other DNA
catatttatggatga

SEQ ID NO: 4183 - DNA, 15 bp, synthetic construct
  source 1..15: mol_type = other DNA
atccactcaagttct

SEQ ID NO: 4184 - DNA, 15 bp, synthetic construct
  source 1..15: mol_type = other DNA
taacacatagcaaag

SEQ ID NO: 4185 - DNA, 15 bp, synthetic construct
  source 1..15: mol_type = other DNA
tttacatacaagcgt

SEQ ID NO: 4186 - DNA, 15 bp, synthetic construct
  source 1..15: mol_type = other DNA
tttctggaattactc

SEQ ID NO: 4187 - DNA, 15 bp, synthetic construct
  source 1..15: mol_type = other DNA
caagaaaaatacaca

SEQ ID NO: 4188 - DNA, 15 bp, synthetic construct
  source 1..15: mol_type = other DNA
gtcctttaatgacag

SEQ ID NO: 4189 - DNA, 15 bp, synthetic construct
  source 1..15: mol_type = other DNA
ataccttggccaatt

SEQ ID NO: 4190 - DNA, 15 bp, synthetic construct
  source 1..15: mol_type = other DNA
ttttggattttacac

SEQ ID NO: 4191 - DNA, 15 bp, synthetic construct
  source 1..15: mol_type = other DNA
gaattacttcaatgt

SEQ ID NO: 4192 - DNA, 15 bp, synthetic construct
  source 1..15: mol_type = other DNA
tggagaaaggatata

SEQ ID NO: 4193 - DNA, 15 bp, synthetic construct
  source 1..15: mol_type = other DNA
attaccaaattacaa

SEQ ID NO: 4194 - DNA, 15 bp, synthetic construct
  source 1..15: mol_type = other DNA
tggtgtttttcctga

SEQ ID NO: 4195 - DNA, 15 bp, synthetic construct
  source 1..15: mol_type = other DNA
tccaaggtttcaagg

SEQ ID NO: 4196 - DNA, 15 bp, synthetic construct
  source 1..15: mol_type = other DNA
ctcgtcagatgaact

SEQ ID NO: 4197 - DNA, 15 bp, synthetic construct
  source 1..15: mol_type = other DNA
atgcagtcaataaag

SEQ ID NO: 4198 - DNA, 15 bp, synthetic construct
  source 1..15: mol_type = other DNA
tggtagagaagtaag

SEQ ID NO: 4199 - DNA, 15 bp, synthetic construct
  source 1..15: mol_type = other DNA
tatatgtataacaaa

SEQ ID NO: 4200 - DNA, 15 bp, synthetic construct
  source 1..15: mol_type = other DNA
tcttcatgtttattt

SEQ ID NO: 4201 - DNA, 15 bp, synthetic construct
  source 1..15: mol_type = other DNA
agctttgcttttcaa

SEQ ID NO: 4202 - DNA, 15 bp, synthetic construct
  source 1..15: mol_type = other DNA
tacttgggagatttc

SEQ ID NO: 4203 - DNA, 15 bp, synthetic construct
  source 1..15: mol_type = other DNA
tacactagggctaag

SEQ ID NO: 4204 - DNA, 15 bp, synthetic construct
  source 1..15: mol_type = other DNA
tgttgttatagcatt

SEQ ID NO: 4205 - DNA, 15 bp, synthetic construct
  source 1..15: mol_type = other DNA
ggagcataaagccta

SEQ ID NO: 4206 - DNA, 15 bp, synthetic construct
  source 1..15: mol_type = other DNA
atcaggctctgcttt

SEQ ID NO: 4207 - DNA, 15 bp, synthetic construct
  source 1..15: mol_type = other DNA
aaagctaggaccgtg

SEQ ID NO: 4208 - DNA, 15 bp, synthetic construct
  source 1..15: mol_type = other DNA
ataggctgcgagggt

SEQ ID NO: 4209 - DNA, 15 bp, synthetic construct
  source 1..15: mol_type = other DNA
gcctgttgtgaaatt

SEQ ID NO: 4210 - DNA, 15 bp, synthetic construct
  source 1..15: mol_type = other DNA
attaacacagaggag

SEQ ID NO: 4211 - DNA, 15 bp, synthetic construct
  source 1..15: mol_type = other DNA
tctttcctcctcttc

SEQ ID NO: 4212 - DNA, 15 bp, synthetic construct
  source 1..15: mol_type = other DNA
ccttaaccacaaggg

SEQ ID NO: 4213 - DNA, 15 bp, synthetic construct
  source 1..15: mol_type = other DNA
tttgggtcctgcgtg

SEQ ID NO: 4214 - DNA, 15 bp, synthetic construct
  source 1..15: mol_type = other DNA
cctcagtgtgcacga

SEQ ID NO: 4215 - DNA, 15 bp, synthetic construct
  source 1..15: mol_type = other DNA
acagatgggcatcgg

SEQ ID NO: 4216 - DNA, 15 bp, synthetic construct
  source 1..15: mol_type = other DNA
tgctgttcctagacg

SEQ ID NO: 4217 - DNA, 15 bp, synthetic construct
  source 1..15: mol_type = other DNA
tctcggcgcaggtcc

SEQ ID NO: 4218 - DNA, 15 bp, synthetic construct
  source 1..15: mol_type = other DNA
ccaacaaggacttct

SEQ ID NO: 4219 - DNA, 15 bp, synthetic construct
  source 1..15: mol_type = other DNA
catgcaccctgcgtc

SEQ ID NO: 4220 - DNA, 15 bp, synthetic construct
  source 1..15: mol_type = other DNA
tatgctggtcagcac

SEQ ID NO: 4221 - DNA, 15 bp, synthetic construct
  source 1..15: mol_type = other DNA
gcagcgagaggatga

SEQ ID NO: 4222 - DNA, 15 bp, synthetic construct
  source 1..15: mol_type = other DNA
acagctgtccagcgt

SEQ ID NO: 4223 - DNA, 15 bp, synthetic construct
  source 1..15: mol_type = other DNA
gcacgcttcgctgta

SEQ ID NO: 4224 - DNA, 15 bp, synthetic construct
  source 1..15: mol_type = other DNA
tctcgctggcggaga

SEQ ID NO: 4225 - DNA, 15 bp, synthetic construct
  source 1..15: mol_type = other DNA
gcacgcacagagtag

SEQ ID NO: 4226 - DNA, 15 bp, synthetic construct
  source 1..15: mol_type = other DNA
accgacaccgcctga

SEQ ID NO: 4227 - DNA, 15 bp, synthetic construct
  source 1..15: mol_type = other DNA
atgaccagcagctcc

SEQ ID NO: 4228 - DNA, 15 bp, synthetic construct
  source 1..15: mol_type = other DNA
actgctcgatggctt

SEQ ID NO: 4229 - DNA, 15 bp, synthetic construct
  source 1..15: mol_type = other DNA
tcaggatggtcacgg

SEQ ID NO: 4230 - DNA, 15 bp, synthetic construct
  source 1..15: mol_type = other DNA
attgtcaggtcctgt

SEQ ID NO: 4231 - DNA, 15 bp, synthetic construct
  source 1..15: mol_type = other DNA
ccgcgtcggtgcctc

SEQ ID NO: 4232 - DNA, 15 bp, synthetic construct
  source 1..15: mol_type = other DNA
cggctcggctgccat

SEQ ID NO: 4233 - DNA, 15 bp, synthetic construct
  source 1..15: mol_type = other DNA
agcccggtcatcagc

SEQ ID NO: 4234 - DNA, 15 bp, synthetic construct
  source 1..15: mol_type = other DNA
atacgtccttcttcg

SEQ ID NO: 4235 - DNA, 15 bp, synthetic construct
  source 1..15: mol_type = other DNA
cccatgaggaagtag

SEQ ID NO: 4236 - DNA, 15 bp, synthetic construct
  source 1..15: mol_type = other DNA
gctgcgtcagtaccg

SEQ ID NO: 4237 - DNA, 15 bp, synthetic construct
  source 1..15: mol_type = other DNA
atgatgccgatgacc

SEQ ID NO: 4238 - DNA, 15 bp, synthetic construct
  source 1..15: mol_type = other DNA
tgacgcaacaggatg

SEQ ID NO: 4239 - DNA, 15 bp, synthetic construct
  source 1..15: mol_type = other DNA
ttcagcatctcacgc

SEQ ID NO: 4240 - DNA, 15 bp, synthetic construct
  source 1..15: mol_type = other DNA
cgtttggccctggat

SEQ ID NO: 4241 - DNA, 15 bp, synthetic construct
  source 1..15: mol_type = other DNA
ctccagcagacacta

SEQ ID NO: 4242 - DNA, 15 bp, synthetic construct
  source 1..15: mol_type = other DNA
cgtctctaacaccag

SEQ ID NO: 4243 - DNA, 15 bp, synthetic construct
  source 1..15: mol_type = other DNA
gccacagcctcgttg

SEQ ID NO: 4244 - DNA, 15 bp, synthetic construct
  source 1..15: mol_type = other DNA
tgctgaactgcagag

SEQ ID NO: 4245 - DNA, 15 bp, synthetic construct
  source 1..15: mol_type = other DNA
aagtgacaaagtctg

SEQ ID NO: 4246 - DNA, 15 bp, synthetic construct
  source 1..15: mol_type = other DNA
ggcaccgacacttct

SEQ ID NO: 4247 - DNA, 15 bp, synthetic construct
  source 1..15: mol_type = other DNA
cggagaatctggagg

SEQ ID NO: 4248 - DNA, 15 bp, synthetic construct
  source 1..15: mol_type = other DNA
ttcagttagcaagca

SEQ ID NO: 4249 - DNA, 15 bp, synthetic construct
  source 1..15: mol_type = other DNA
caccgaaagcctagg

SEQ ID NO: 4250 - DNA, 15 bp, synthetic construct
  source 1..15: mol_type = other DNA
acctggccgacattc

SEQ ID NO: 4251 - DNA, 15 bp, synthetic construct
  source 1..15: mol_type = other DNA
ctggaagctcaaccc

SEQ ID NO: 4252 - DNA, 15 bp, synthetic construct
  source 1..15: mol_type = other DNA
aggaaggttctggtc

SEQ ID NO: 4253 - DNA, 15 bp, synthetic construct
  source 1..15: mol_type = other DNA
cgaggagatagtcaa

SEQ ID NO: 4254 - DNA, 15 bp, synthetic construct
  source 1..15: mol_type = other DNA
gcacgggtgagatag

SEQ ID NO: 4255 - DNA, 15 bp, synthetic construct
  source 1..15: mol_type = other DNA
ctttcttagcttggc

SEQ ID NO: 4256 - DNA, 15 bp, synthetic construct
  source 1..15: mol_type = other DNA
tacttcttagtgatc

SEQ ID NO: 4257 - DNA, 15 bp, synthetic construct
  source 1..15: mol_type = other DNA
tacatcgcgctggat

SEQ ID NO: 4258 - DNA, 15 bp, synthetic construct
  source 1..15: mol_type = other DNA
acactctttgttagg

SEQ ID NO: 4259 - DNA, 15 bp, synthetic construct
  source 1..15: mol_type = other DNA
cccacgtaccatctt

SEQ ID NO: 4260 - DNA, 15 bp, synthetic construct
  source 1..15: mol_type = other DNA
agggtgcagatcacc

SEQ ID NO: 4261 - DNA, 15 bp, synthetic construct
  source 1..15: mol_type = other DNA
ctgtccttcatctcc

SEQ ID NO: 4262 - DNA, 15 bp, synthetic construct
  source 1..15: mol_type = other DNA
gccggtgatgacagc

SEQ ID NO: 4263 - DNA, 15 bp, synthetic construct
  source 1..15: mol_type = other DNA
tcctgctctctgtct

SEQ ID NO: 4264 - DNA, 15 bp, synthetic construct
  source 1..15: mol_type = other DNA
tcaggtagggccaat

SEQ ID NO: 4265 - DNA, 15 bp, synthetic construct
  source 1..15: mol_type = other DNA
accgtgaccagctac

SEQ ID NO: 4266 - DNA, 15 bp, synthetic construct
  source 1..15: mol_type = other DNA
cttgaaattcctcag

SEQ ID NO: 4267 - DNA, 15 bp, synthetic construct
  source 1..15: mol_type = other DNA
acctgctctatctct

SEQ ID NO: 4268 - DNA, 15 bp, synthetic construct
  source 1..15: mol_type = other DNA
tgagctccagagacg

SEQ ID NO: 4269 - DNA, 15 bp, synthetic construct
  source 1..15: mol_type = other DNA
gcgtgctgcagttcg

SEQ ID NO: 4270 - DNA, 15 bp, synthetic construct
  source 1..15: mol_type = other DNA
tactgctgccaggtc

SEQ ID NO: 4271 - DNA, 15 bp, synthetic construct
  source 1..15: mol_type = other DNA
tggttctatgtgtac

SEQ ID NO: 4272 - DNA, 15 bp, synthetic construct
  source 1..15: mol_type = other DNA
aagaacgggagcatg

SEQ ID NO: 4273 - DNA, 15 bp, synthetic construct
  source 1..15: mol_type = other DNA
ctgacatcgacaaca

SEQ ID NO: 4274 - DNA, 15 bp, synthetic construct
  source 1..15: mol_type = other DNA
gcccacggtaatctc

SEQ ID NO: 4275 - DNA, 15 bp, synthetic construct
  source 1..15: mol_type = other DNA
gccttaagctgctgg

SEQ ID NO: 4276 - DNA, 15 bp, synthetic construct
  source 1..15: mol_type = other DNA
cttgagctcgaagac

SEQ ID NO: 4277 - DNA, 15 bp, synthetic construct
  source 1..15: mol_type = other DNA
ccaaggacatcgtgc

SEQ ID NO: 4278 - DNA, 15 bp, synthetic construct
  source 1..15: mol_type = other DNA
aagaaaaagaagtcg

SEQ ID NO: 4279 - DNA, 15 bp, synthetic construct
  source 1..15: mol_type = other DNA
tcgagcacgactggc

SEQ ID NO: 4280 - DNA, 15 bp, synthetic construct
  source 1..15: mol_type = other DNA
cacatggtcgcaagg

SEQ ID NO: 4281 - DNA, 15 bp, synthetic construct
  source 1..15: mol_type = other DNA
tccaacgtggaggag

SEQ ID NO: 4282 - DNA, 15 bp, synthetic construct
  source 1..15: mol_type = other DNA
tttttgtctctgcct

SEQ ID NO: 4283 - DNA, 15 bp, synthetic construct
  source 1..15: mol_type = other DNA
gatcaacttctgctc

SEQ ID NO: 4284 - DNA, 15 bp, synthetic construct
  source 1..15: mol_type = other DNA
agagtgattaattcc

SEQ ID NO: 4285 - DNA, 15 bp, synthetic construct
  source 1..15: mol_type = other DNA
cccatctgtatgagg

SEQ ID NO: 4286 - DNA, 15 bp, synthetic construct
  source 1..15: mol_type = other DNA
cacagatggatggag

SEQ ID NO: 4287 - DNA, 15 bp, synthetic construct
  source 1..15: mol_type = other DNA
gctccatgcttatct

SEQ ID NO: 4288 - DNA, 15 bp, synthetic construct
  source 1..15: mol_type = other DNA
gccggtttttaatca

SEQ ID NO: 4289 - DNA, 15 bp, synthetic construct
  source 1..15: mol_type = other DNA
gaacattcccactgt

SEQ ID NO: 4290 - DNA, 15 bp, synthetic construct
  source 1..15: mol_type = other DNA
caaatttgatttaga

SEQ ID NO: 4291 - DNA, 15 bp, synthetic construct
  source 1..15: mol_type = other DNA
tccagtcatgcaagg

SEQ ID NO: 4292 - DNA, 15 bp, synthetic construct
  source 1..15: mol_type = other DNA
ctgaaagtccatgtg

SEQ ID NO: 4293 - DNA, 15 bp, synthetic construct
  source 1..15: mol_type = other DNA
cagtgatgatctatg

SEQ ID NO: 4294 - DNA, 15 bp, synthetic construct
  source 1..15: mol_type = other DNA
tcaacaatgaccaaa

SEQ ID NO: 4295 - DNA, 15 bp, synthetic construct
  source 1..15: mol_type = other DNA
agggaccagcttttg

SEQ ID NO: 4296 - DNA, 15 bp, synthetic construct
  source 1..15: mol_type = other DNA
tgctatgctttctct

SEQ ID NO: 4297 - DNA, 15 bp, synthetic construct
  source 1..15: mol_type = other DNA
gtatgttactgttcc

SEQ ID NO: 4298 - DNA, 15 bp, synthetic construct
  source 1..15: mol_type = other DNA
catgcctcatggtta

SEQ ID NO: 4299 - DNA, 15 bp, synthetic construct
  source 1..15: mol_type = other DNA
aatgacacagatata

SEQ ID NO: 4300 - DNA, 15 bp, synthetic construct
  source 1..15: mol_type = other DNA
aacatggtttgttgt

SEQ ID NO: 4301 - DNA, 15 bp, synthetic construct
  source 1..15: mol_type = other DNA
gcacccgaaggtttc

SEQ ID NO: 4302 - DNA, 15 bp, synthetic construct
  source 1..15: mol_type = other DNA
cttctcctccggaag

SEQ ID NO: 4303 - DNA, 15 bp, synthetic construct
  source 1..15: mol_type = other DNA
agtgcaactcaaact

SEQ ID NO: 4304 - DNA, 15 bp, synthetic construct
  source 1..15: mol_type = other DNA
ctcacagatgacacc

SEQ ID NO: 4305 - DNA, 15 bp, synthetic construct
  source 1..15: mol_type = other DNA
tgtccgtagttacct

SEQ ID NO: 4306 - DNA, 15 bp, synthetic construct
  source 1..15: mol_type = other DNA
ctcactcacggaaat

SEQ ID NO: 4307 - DNA, 15 bp, synthetic construct
  source 1..15: mol_type = other DNA
tgaccggaataatca

SEQ ID NO: 4308 - DNA, 15 bp, synthetic construct
  source 1..15: mol_type = other DNA
gcaaacctttcgaag

SEQ ID NO: 4309 - DNA, 15 bp, synthetic construct
  source 1..15: mol_type = other DNA
gacttcttcattgtt

SEQ ID NO: 4310 - DNA, 15 bp, synthetic construct
  source 1..15: mol_type = other DNA
aaatcgttctttgta

SEQ ID NO: 4311 - DNA, 15 bp, synthetic construct
  source 1..15: mol_type = other DNA
acctctcttcctgtc

SEQ ID NO: 4312 - DNA, 15 bp, synthetic construct
  source 1..15: mol_type = other DNA
aagttggtaccaaaa

SEQ ID NO: 4313 - DNA, 15 bp, synthetic construct
  source 1..15: mol_type = other DNA
acgattacaaatctt

SEQ ID NO: 4314 - DNA, 15 bp, synthetic construct
  source 1..15: mol_type = other DNA
tgttccaagcagagc

SEQ ID NO: 4315 - DNA, 15 bp, synthetic construct
  source 1..15: mol_type = other DNA
ctcaaataaagtcct

SEQ ID NO: 4316 - DNA, 15 bp, synthetic construct
  source 1..15: mol_type = other DNA
tactgctctgtgctg

SEQ ID NO: 4317 - DNA, 15 bp, synthetic construct
  source 1..15: mol_type = other DNA
gatgtttgtcccctc

SEQ ID NO: 4318 - DNA, 15 bp, synthetic construct
  source 1..15: mol_type = other DNA
acctcaggtgattta

SEQ ID NO: 4319 - DNA, 15 bp, synthetic construct
  source 1..15: mol_type = other DNA
ttagcatgatctcat

SEQ ID NO: 4320 - DNA, 15 bp, synthetic construct
  source 1..15: mol_type = other DNA
ttctccctcatgcgt

SEQ ID NO: 4321 - DNA, 15 bp, synthetic construct
  source 1..15: mol_type = other DNA
ctccaattccttcaa

SEQ ID NO: 4322 - DNA, 15 bp, synthetic construct
  source 1..15: mol_type = other DNA
ttttcatctgtgcca

SEQ ID NO: 4323 - DNA, 15 bp, synthetic construct
  source 1..15: mol_type = other DNA
gaaggatagcatgta

SEQ ID NO: 4324 - DNA, 15 bp, synthetic construct
  source 1..15: mol_type = other DNA
cttttgctggaaact

SEQ ID NO: 4325 - DNA, 15 bp, synthetic construct
  source 1..15: mol_type = other DNA
ttttagaacagccta

SEQ ID NO: 4326 - DNA, 15 bp, synthetic construct
  source 1..15: mol_type = other DNA
tgtgtcattggatat

SEQ ID NO: 4327 - DNA, 15 bp, synthetic construct
  source 1..15: mol_type = other DNA
agagcgcattacagc

SEQ ID NO: 4328 - DNA, 15 bp, synthetic construct
  source 1..15: mol_type = other DNA
ttaccatcctgatat

SEQ ID NO: 4329 - DNA, 15 bp, synthetic construct
  source 1..15: mol_type = other DNA
ttcatgagtttggta

SEQ ID NO: 4330 - DNA, 15 bp, synthetic construct
  source 1..15: mol_type = other DNA
gtacctgtctgccta

SEQ ID NO: 4331 - DNA, 15 bp, synthetic construct
  source 1..15: mol_type = other DNA
actgcttaatggtga

SEQ ID NO: 4332 - DNA, 15 bp, synthetic construct
  source 1..15: mol_type = other DNA
tcagttctggagatg

SEQ ID NO: 4333 - DNA, 15 bp, synthetic construct
  source 1..15: mol_type = other DNA
atatttagattggcc

SEQ ID NO: 4334 - DNA, 15 bp, synthetic construct
  source 1..15: mol_type = other DNA
gaaaataaaagctat

SEQ ID NO: 4335 - DNA, 15 bp, synthetic construct
  source 1..15: mol_type = other DNA
tgaaccattttctgt

SEQ ID NO: 4336 - DNA, 15 bp, synthetic construct
  source 1..15: mol_type = other DNA
attcagaaagcaaag

SEQ ID NO: 4337 - DNA, 15 bp, synthetic construct
  source 1..15: mol_type = other DNA
gcatctgaccgtttt

SEQ ID NO: 4338 - DNA, 15 bp, synthetic construct
  source 1..15: mol_type = other DNA
ctggtcatataactg

SEQ ID NO: 4339 - DNA, 15 bp, synthetic construct
  source 1..15: mol_type = other DNA
aggctgtaaaatacg

SEQ ID NO: 4340 - DNA, 15 bp, synthetic construct
  source 1..15: mol_type = other DNA
accaactccattgac

SEQ ID NO: 4341 - DNA, 15 bp, synthetic construct
  source 1..15: mol_type = other DNA
tagggaatagagttt

SEQ ID NO: 4342 - DNA, 15 bp, synthetic construct
  source 1..15: mol_type = other DNA
gtgcacatctaacgg

SEQ ID NO: 4343 - DNA, 15 bp, synthetic construct
  source 1..15: mol_type = other DNA
cctgactttttaata

SEQ ID NO: 4344 - DNA, 15 bp, synthetic construct
  source 1..15: mol_type = other DNA
caaaacaagtttcaa

SEQ ID NO: 4345 - DNA, 15 bp, synthetic construct
  source 1..15: mol_type = other DNA
acaagaaaattccgt

SEQ ID NO: 4346 - DNA, 15 bp, synthetic construct
  source 1..15: mol_type = other DNA
ttacatgcatatttg

SEQ ID NO: 4347 - DNA, 15 bp, synthetic construct
  source 1..15: mol_type = other DNA
taaccaagggactac

SEQ ID NO: 4348 - DNA, 15 bp, synthetic construct
  source 1..15: mol_type = other DNA
ctgagtgtttgttta

SEQ ID NO: 4349 - DNA, 15 bp, synthetic construct
  source 1..15: mol_type = other DNA
ctgcctgattacaca

SEQ ID NO: 4350 - DNA, 15 bp, synthetic construct
  source 1..15: mol_type = other DNA
cctcctcgggatacg

SEQ ID NO: 4351 - DNA, 15 bp, synthetic construct
  source 1..15: mol_type = other DNA
atcccggtgatgaga

SEQ ID NO: 4352 - DNA, 15 bp, synthetic construct
  source 1..15: mol_type = other DNA
tgtgtatcagatgtc

SEQ ID NO: 4353 - DNA, 15 bp, synthetic construct
  source 1..15: mol_type = other DNA
acctgtgaatggtct

SEQ ID NO: 4354 - DNA, 15 bp, synthetic construct
  source 1..15: mol_type = other DNA
agtaactataattaa

SEQ ID NO: 4355 - DNA, 15 bp, synthetic construct
  source 1..15: mol_type = other DNA
actgctgtttttatt

SEQ ID NO: 4356 - DNA, 15 bp, synthetic construct
  source 1..15: mol_type = other DNA
tgacaatgaaacagt

SEQ ID NO: 4357 - DNA, 15 bp, synthetic construct
  source 1..15: mol_type = other DNA
cctctttctaaacag

SEQ ID NO: 4358 - DNA, 15 bp, synthetic construct
  source 1..15: mol_type = other DNA
ccccttgggtatctt

SEQ ID NO: 4359 - DNA, 15 bp, synthetic construct
  source 1..15: mol_type = other DNA
ttgaggtcctgatgc

SEQ ID NO: 4360 - DNA, 15 bp, synthetic construct
  source 1..15: mol_type = other DNA
tgtaaaaggccaagt

SEQ ID NO: 4361 - DNA, 15 bp, synthetic construct
  source 1..15: mol_type = other DNA
atgagatctgactgt

SEQ ID NO: 4362 - DNA, 15 bp, synthetic construct
  source 1..15: mol_type = other DNA
gaataccttttccat

SEQ ID NO: 4363 - DNA, 15 bp, synthetic construct
  source 1..15: mol_type = other DNA
ggcttcttcatctta

SEQ ID NO: 4364 - DNA, 15 bp, synthetic construct
  source 1..15: mol_type = other DNA
aaaagcatggaaagg

SEQ ID NO: 4365 - DNA, 15 bp, synthetic construct
  source 1..15: mol_type = other DNA
aggaagaaggtggaa

SEQ ID NO: 4366 - DNA, 15 bp, synthetic construct
  source 1..15: mol_type = other DNA
ccctatgaagacagt

SEQ ID NO: 4367 - DNA, 15 bp, synthetic construct
  source 1..15: mol_type = other DNA
gaactacgaagttta

SEQ ID NO: 4368 - DNA, 15 bp, synthetic construct
  source 1..15: mol_type = other DNA
ccaaatgcataccat

SEQ ID NO: 4369 - DNA, 15 bp, synthetic construct
  source 1..15: mol_type = other DNA
ggacaaggagttttt

SEQ ID NO: 4370 - DNA, 15 bp, synthetic construct
  source 1..15: mol_type = other DNA
gtaagctcgcacaat

SEQ ID NO: 4371 - DNA, 15 bp, synthetic construct
  source 1..15: mol_type = other DNA
gcattttgggcctaa

SEQ ID NO: 4372 - DNA, 15 bp, synthetic construct
  source 1..15: mol_type = other DNA
gagagtgagtatgct

SEQ ID NO: 4373 - DNA, 15 bp, synthetic construct
  source 1..15: mol_type = other DNA
atttccttcatacat

SEQ ID NO: 4374 - DNA, 15 bp, synthetic construct
  source 1..15: mol_type = other DNA
ctatccatgaagttt

SEQ ID NO: 4375 - DNA, 15 bp, synthetic construct
  source 1..15: mol_type = other DNA
ttgggaactcagaat

SEQ ID NO: 4376 - DNA, 15 bp, synthetic construct
  source 1..15: mol_type = other DNA
tgttgccgctcacta

SEQ ID NO: 4377 - DNA, 15 bp, synthetic construct
  source 1..15: mol_type = other DNA
tattttcacagtccc

SEQ ID NO: 4378 - DNA, 15 bp, synthetic construct
  source 1..15: mol_type = other DNA
aaaggatctagatcg

SEQ ID NO: 4379 - DNA, 15 bp, synthetic construct
  source 1..15: mol_type = other DNA
aaaatcttgctgctt

SEQ ID NO: 4380 - DNA, 15 bp, synthetic construct
  source 1..15: mol_type = other DNA
gagaaattccctgct

SEQ ID NO: 4381 - DNA, 15 bp, synthetic construct
  source 1..15: mol_type = other DNA
aaaaagcatcaggat

SEQ ID NO: 4382 - DNA, 15 bp, synthetic construct
  source 1..15: mol_type = other DNA
atgggtttccaaact

SEQ ID NO: 4383 - DNA, 15 bp, synthetic construct
  source 1..15: mol_type = other DNA
cacgtactttctctc

SEQ ID NO: 4384 - DNA, 15 bp, synthetic construct
  source 1..15: mol_type = other DNA
cctgtagattattgg

SEQ ID NO: 4385 - DNA, 15 bp, synthetic construct
  source 1..15: mol_type = other DNA
ctcaggaagatgaga

SEQ ID NO: 4386 - DNA, 15 bp, synthetic construct
  source 1..15: mol_type = other DNA
tagcacagcacttat

SEQ ID NO: 4387 - DNA, 15 bp, synthetic construct
  source 1..15: mol_type = other DNA
gatgtttggtgagga

SEQ ID NO: 4388 - DNA, 15 bp, synthetic construct
  source 1..15: mol_type = other DNA
tcagatgtgctccag

SEQ ID NO: 4389 - DNA, 15 bp, synthetic construct
  source 1..15: mol_type = other DNA
tggtggctcgatatg

SEQ ID NO: 4390 - DNA, 15 bp, synthetic construct
  source 1..15: mol_type = other DNA
aaaattgaaccagga

SEQ ID NO: 4391 - DNA, 15 bp, synthetic construct
  source 1..15: mol_type = other DNA
tcctgcacaaccaat

SEQ ID NO: 4392 - DNA, 15 bp, synthetic construct
  source 1..15: mol_type = other DNA
tgtgtgatctggaac

SEQ ID NO: 4393 - DNA, 15 bp, synthetic construct
  source 1..15: mol_type = other DNA
caaactactattggc

SEQ ID NO: 4394 - DNA, 15 bp, synthetic construct
  source 1..15: mol_type = other DNA
aagaaacgacagcta

SEQ ID NO: 4395 - DNA, 15 bp, synthetic construct
  source 1..15: mol_type = other DNA
atgtatgcggcctat

SEQ ID NO: 4396 - DNA, 15 bp, synthetic construct
  source 1..15: mol_type = other DNA
gaacactggaaaggc

SEQ ID NO: 4397 - DNA, 15 bp, synthetic construct
  source 1..15: mol_type = other DNA
tggaaatctttcttt

SEQ ID NO: 4398 - DNA, 15 bp, synthetic construct
  source 1..15: mol_type = other DNA
gtgtatactggtcct

SEQ ID NO: 4399 - DNA, 15 bp, synthetic construct
  source 1..15: mol_type = other DNA
atcagcatgcattat

SEQ ID NO: 4400 - DNA, 15 bp, synthetic construct
  source 1..15: mol_type = other DNA
ggtttaaagtttggt

SEQ ID NO: 4401 - DNA, 15 bp, synthetic construct
  source 1..15: mol_type = other DNA
gtgagtcaccaaaaa

SEQ ID NO: 4402 - DNA, 15 bp, synthetic construct
  source 1..15: mol_type = other DNA
aatccacagtcagtt

SEQ ID NO: 4403 - DNA, 15 bp, synthetic construct
  source 1..15: mol_type = other DNA
ataactgagatccag

SEQ ID NO: 4404 - DNA, 15 bp, synthetic construct
  source 1..15: mol_type = other DNA
attcaacattaggaa

SEQ ID NO: 4405 - DNA, 15 bp, synthetic construct
  source 1..15: mol_type = other DNA
agtactggagtacat

SEQ ID NO: 4406 - DNA, 15 bp, synthetic construct
  source 1..15: mol_type = other DNA
tttgaaaacagttga

SEQ ID NO: 4407 - DNA, 15 bp, synthetic construct
  source 1..15: mol_type = other DNA
ccttgttccatatta

SEQ ID NO: 4408 - DNA, 15 bp, synthetic construct
  source 1..15: mol_type = other DNA
gatcgccagcactaa

SEQ ID NO: 4409 - DNA, 15 bp, synthetic construct
  source 1..15: mol_type = other DNA
agatgcgcggcgttg

SEQ ID NO: 4410 - DNA, 15 bp, synthetic construct
  source 1..15: mol_type = other DNA
gctgacaggttcctc

SEQ ID NO: 4411 - DNA, 15 bp, synthetic construct
  source 1..15: mol_type = other DNA
cctacatactttgta

SEQ ID NO: 4412 - DNA, 15 bp, synthetic construct
  source 1..15: mol_type = other DNA
aaaatatgcaacctt

SEQ ID NO: 4413 - DNA, 15 bp, synthetic construct
  source 1..15: mol_type = other DNA
ggtaacattaagaag

SEQ ID NO: 4414 - DNA, 15 bp, synthetic construct
  source 1..15: mol_type = other DNA
ccactcattcatcct

SEQ ID NO: 4415 - DNA, 15 bp, synthetic construct
  source 1..15: mol_type = other DNA
ttttgatttgcaatg

SEQ ID NO: 4416 - DNA, 15 bp, synthetic construct
  source 1..15: mol_type = other DNA
acccaaagcaacaat

SEQ ID NO: 4417 - DNA, 15 bp, synthetic construct
  source 1..15: mol_type = other DNA
ctttttgttgttgtt

SEQ ID NO: 4418 - DNA, 15 bp, synthetic construct
  source 1..15: mol_type = other DNA
aattgacaacttact

SEQ ID NO: 4419 - DNA, 15 bp, synthetic construct
  source 1..15: mol_type = other DNA
tcaggaaacttctca

SEQ ID NO: 4420 - DNA, 15 bp, synthetic construct
  source 1..15: mol_type = other DNA
ttttgacaacaaggt

SEQ ID NO: 4421 - DNA, 15 bp, synthetic construct
  source 1..15: mol_type = other DNA
cctgcataagcatag

SEQ ID NO: 4422 - DNA, 15 bp, synthetic construct
  source 1..15: mol_type = other DNA
catgctatttaaggg

SEQ ID NO: 4423 - DNA, 15 bp, synthetic construct
  source 1..15: mol_type = other DNA
tttcttgctttacac

SEQ ID NO: 4424 - DNA, 15 bp, synthetic construct
  source 1..15: mol_type = other DNA
cactcttccttctcc

SEQ ID NO: 4425 - DNA, 15 bp, synthetic construct
  source 1..15: mol_type = other DNA
acactcagtgtatgg

SEQ ID NO: 4426 - DNA, 15 bp, synthetic construct
  source 1..15: mol_type = other DNA
ccgatatagtgaggt

SEQ ID NO: 4427 - DNA, 15 bp, synthetic construct
  source 1..15: mol_type = other DNA
ttgtctgtttcacaa

SEQ ID NO: 4428 - DNA, 15 bp, synthetic construct
  source 1..15: mol_type = other DNA
ttggttcaccgggaa

SEQ ID NO: 4429 - DNA, 15 bp, synthetic construct
  source 1..15: mol_type = other DNA
aacatgtccgaaggt

SEQ ID NO: 4430 - DNA, 15 bp, synthetic construct
  source 1..15: mol_type = other DNA
cagtcacatcactta

SEQ ID NO: 4431 - DNA, 15 bp, synthetic construct
  source 1..15: mol_type = other DNA
atgttcaatgttgca

SEQ ID NO: 4432 - DNA, 15 bp, synthetic construct
  source 1..15: mol_type = other DNA
agtgacacagtgaat

SEQ ID NO: 4433 - DNA, 15 bp, synthetic construct
  source 1..15: mol_type = other DNA
tactagcttcctgta

SEQ ID NO: 4434 - DNA, 15 bp, synthetic construct
  source 1..15: mol_type = other DNA
ccaaggcctccataa

SEQ ID NO: 4435 - DNA, 15 bp, synthetic construct
  source 1..15: mol_type = other DNA
gcacaaaatcttgca

SEQ ID NO: 4436 - DNA, 15 bp, synthetic construct
  source 1..15: mol_type = other DNA
aatgtcatcaaaagt

SEQ ID NO: 4437 - DNA, 15 bp, synthetic construct
  source 1..15: mol_type = other DNA
tgacattgtttcctc

SEQ ID NO: 4438 - DNA, 15 bp, synthetic construct
  source 1..15: mol_type = other DNA
aattacctgaacaac

SEQ ID NO: 4439 - DNA, 15 bp, synthetic construct
  source 1..15: mol_type = other DNA
agaattggacagatc

SEQ ID NO: 4440 - DNA, 15 bp, synthetic construct
  source 1..15: mol_type = other DNA
tttcttctgctgtat

SEQ ID NO: 4441 - DNA, 15 bp, synthetic construct
  source 1..15: mol_type = other DNA
gtcacagctgtgaat

SEQ ID NO: 4442 - DNA, 15 bp, synthetic construct
  source 1..15: mol_type = other DNA
tactttcagaagcat

SEQ ID NO: 4443 - DNA, 15 bp, synthetic construct
  source 1..15: mol_type = other DNA
ccctgctacataatc

SEQ ID NO: 4444 - DNA, 15 bp, synthetic construct
  source 1..15: mol_type = other DNA
tctgcagtgtactgg

SEQ ID NO: 4445 - DNA, 15 bp, synthetic construct
  source 1..15: mol_type = other DNA
ccacagtagattgct

SEQ ID NO: 4446 - DNA, 15 bp, synthetic construct
  source 1..15: mol_type = other DNA
gaaagatgaatgaag

SEQ ID NO: 4447 - DNA, 15 bp, synthetic construct
  source 1..15: mol_type = other DNA
taataaaacttctct

SEQ ID NO: 4448 - DNA, 15 bp, synthetic construct
  source 1..15: mol_type = other DNA
gttacaggtcatcat

SEQ ID NO: 4449 - DNA, 15 bp, synthetic construct
  source 1..15: mol_type = other DNA
aattcccaccttgtt

SEQ ID NO: 4450 - DNA, 15 bp, synthetic construct
  source 1..15: mol_type = other DNA
gagctgcaatccttt

SEQ ID NO: 4451 - DNA, 15 bp, synthetic construct
  source 1..15: mol_type = other DNA
ctgatgctttgtctc

SEQ ID NO: 4452 - DNA, 15 bp, synthetic construct
  source 1..15: mol_type = other DNA
aatacataagggcta

SEQ ID NO: 4453 - DNA, 15 bp, synthetic construct
  source 1..15: mol_type = other DNA
accccaggctaaact

SEQ ID NO: 4454 - DNA, 15 bp, synthetic construct
  source 1..15: mol_type = other DNA
ctgacaatcaaagag

SEQ ID NO: 4455 - DNA, 15 bp, synthetic construct
  source 1..15: mol_type = other DNA
caagaccacaaatct

SEQ ID NO: 4456 - DNA, 15 bp, synthetic construct
  source 1..15: mol_type = other DNA
tccattcctctgggt

SEQ ID NO: 4457 - DNA, 15 bp, synthetic construct
  source 1..15: mol_type = other DNA
attactttgtaagaa

SEQ ID NO: 4458 - DNA, 15 bp, synthetic construct
  source 1..15: mol_type = other DNA
cactaaatcttctgt

SEQ ID NO: 4459 - DNA, 15 bp, synthetic construct
  source 1..15: mol_type = other DNA
aatactgctatgact

SEQ ID NO: 4460 - DNA, 15 bp, synthetic construct
  source 1..15: mol_type = other DNA
aatagcaatgtccag

SEQ ID NO: 4461 - DNA, 15 bp, synthetic construct
  source 1..15: mol_type = other DNA
aagtatttggccatt

SEQ ID NO: 4462 - DNA, 15 bp, synthetic construct
  source 1..15: mol_type = other DNA
tgtatcttcaagcac

SEQ ID NO: 4463 - DNA, 15 bp, synthetic construct
  source 1..15: mol_type = other DNA
ttctgcactcattta

SEQ ID NO: 4464 - DNA, 15 bp, synthetic construct
  source 1..15: mol_type = other DNA
cagaggaatgttcca

SEQ ID NO: 4465 - DNA, 15 bp, synthetic construct
  source 1..15: mol_type = other DNA
tgagcatcactttga

SEQ ID NO: 4466 - DNA, 15 bp, synthetic construct
  source 1..15: mol_type = other DNA
taaaagtttatctgc

SEQ ID NO: 4467 - DNA, 15 bp, synthetic construct
  source 1..15: mol_type = other DNA
tccgactgggtgaag

SEQ ID NO: 4468 - DNA, 15 bp, synthetic construct
  source 1..15: mol_type = other DNA
ctctgtcttgtccaa

SEQ ID NO: 4469 - DNA, 15 bp, synthetic construct
  source 1..15: mol_type = other DNA
ggaagagcgtcagtt

SEQ ID NO: 4470 - DNA, 15 bp, synthetic construct
  source 1..15: mol_type = other DNA
aataataaaggcaca

SEQ ID NO: 4471 - DNA, 15 bp, synthetic construct
  source 1..15: mol_type = other DNA
gtcacagtttgagag

SEQ ID NO: 4472 - DNA, 15 bp, synthetic construct
  source 1..15: mol_type = other DNA
caatacttcagacac

SEQ ID NO: 4473 - DNA, 15 bp, synthetic construct
  source 1..15: mol_type = other DNA
aaaatgcaacaaaaa

SEQ ID NO: 4474 - DNA, 15 bp, synthetic construct
  source 1..15: mol_type = other DNA
tgatgctttcaaaca

SEQ ID NO: 4475 - DNA, 15 bp, synthetic construct
  source 1..15: mol_type = other DNA
ctttttctatgagct

SEQ ID NO: 4476 - DNA, 15 bp, synthetic construct
  source 1..15: mol_type = other DNA
tgaataggtcccttt

SEQ ID NO: 4477 - DNA, 15 bp, synthetic construct
  source 1..15: mol_type = other DNA
gataaaatgcattgt

SEQ ID NO: 4478 - DNA, 15 bp, synthetic construct
  source 1..15: mol_type = other DNA
tgctaggtcttattg

SEQ ID NO: 4479 - DNA, 15 bp, synthetic construct
  source 1..15: mol_type = other DNA
attggcaattaagta

SEQ ID NO: 4480 - DNA, 15 bp, synthetic construct
  source 1..15: mol_type = other DNA
tgaagataagactct

SEQ ID NO: 4481 - DNA, 15 bp, synthetic construct
  source 1..15: mol_type = other DNA
agaatggagctcagt

SEQ ID NO: 4482 - DNA, 15 bp, synthetic construct
  source 1..15: mol_type = other DNA
tcagaagctaccaca

SEQ ID NO: 4483 - DNA, 15 bp, synthetic construct
  source 1..15: mol_type = other DNA
ctctttctgatcaaa

SEQ ID NO: 4484 - DNA, 15 bp, synthetic construct
  source 1..15: mol_type = other DNA
agttcttcattaagc

SEQ ID NO: 4485 - DNA, 15 bp, synthetic construct
  source 1..15: mol_type = other DNA
aagaaaatggaagaa

SEQ ID NO: 4486 - DNA, 15 bp, synthetic construct
  source 1..15: mol_type = other DNA
aatgagaatcacagg

SEQ ID NO: 4487 - DNA, 15 bp, synthetic construct
  source 1..15: mol_type = other DNA
tcctgccataatagg

SEQ ID NO: 4488 - DNA, 15 bp, synthetic construct
  source 1..15: mol_type = other DNA
gcctgtttgcatcgg

SEQ ID NO: 4489 - DNA, 15 bp, synthetic construct
  source 1..15: mol_type = other DNA
acatcaacagtgagc

SEQ ID NO: 4490 - DNA, 15 bp, synthetic construct
  source 1..15: mol_type = other DNA
acttacttatttcca

SEQ ID NO: 4491 - DNA, 15 bp, synthetic construct
  source 1..15: mol_type = other DNA
accaacggaccaatg

SEQ ID NO: 4492 - DNA, 15 bp, synthetic construct
  source 1..15: mol_type = other DNA
agaagaggaggtaag

SEQ ID NO: 4493 - DNA, 15 bp, synthetic construct
  source 1..15: mol_type = other DNA
taggcattagcactc

SEQ ID NO: 4494 - DNA, 15 bp, synthetic construct
  source 1..15: mol_type = other DNA
gggttaaacagatcc

SEQ ID NO: 4495 - DNA, 15 bp, synthetic construct
  source 1..15: mol_type = other DNA
tcctacagctgtaag

SEQ ID NO: 4496 - DNA, 15 bp, synthetic construct
  source 1..15: mol_type = other DNA
tctcttttcaaagac

SEQ ID NO: 4497 - DNA, 15 bp, synthetic construct
  source 1..15: mol_type = other DNA
ctgaattaagttgtg

SEQ ID NO: 4498 - DNA, 15 bp, synthetic construct
  source 1..15: mol_type = other DNA
ttcgaaagagtattt

SEQ ID NO: 4499 - DNA, 15 bp, synthetic construct
  source 1..15: mol_type = other DNA
aggtgtcccgattag

SEQ ID NO: 4500 - DNA, 15 bp, synthetic construct
  source 1..15: mol_type = other DNA
ttccaaagacagagc

SEQ ID NO: 4501 - DNA, 15 bp, synthetic construct
  source 1..15: mol_type = other DNA
cactcgctgattggt

SEQ ID NO: 4502 - DNA, 15 bp, synthetic construct
  source 1..15: mol_type = other DNA
tcctcatttccaacg

SEQ ID NO: 4503 - DNA, 15 bp, synthetic construct
  source 1..15: mol_type = other DNA
atgttttgatacctt

SEQ ID NO: 4504 - DNA, 15 bp, synthetic construct
  source 1..15: mol_type = other DNA
ggtgtgattacatgg

SEQ ID NO: 4505 - DNA, 15 bp, synthetic construct
  source 1..15: mol_type = other DNA
gattgctttcagagc

SEQ ID NO: 4506 - DNA, 15 bp, synthetic construct
  source 1..15: mol_type = other DNA
tttgcaaatggaaga

SEQ ID NO: 4507 - DNA, 15 bp, synthetic construct
  source 1..15: mol_type = other DNA
gaataatgagttgta

SEQ ID NO: 4508 - DNA, 15 bp, synthetic construct
  source 1..15: mol_type = other DNA
actggctggtcttat

SEQ ID NO: 4509 - DNA, 15 bp, synthetic construct
  source 1..15: mol_type = other DNA
tgttgccatggattg

SEQ ID NO: 4510 - DNA, 15 bp, synthetic construct
  source 1..15: mol_type = other DNA
gttagcaccaaacct

SEQ ID NO: 4511 - DNA, 15 bp, synthetic construct
  source 1..15: mol_type = other DNA
aaatatctttagcat

SEQ ID NO: 4512 - DNA, 15 bp, synthetic construct
  source 1..15: mol_type = other DNA
aacagttccaacagc

SEQ ID NO: 4513 - DNA, 15 bp, synthetic construct
  source 1..15: mol_type = other DNA
tttggtcaaaagttg

SEQ ID NO: 4514 - DNA, 15 bp, synthetic construct
  source 1..15: mol_type = other DNA
tgtttagctaaatgt

SEQ ID NO: 4515 - DNA, 15 bp, synthetic construct
  source 1..15: mol_type = other DNA
agattggcatcacag

SEQ ID NO: 4516 - DNA, 15 bp, synthetic construct
  source 1..15: mol_type = other DNA
tatatcagaccaaag

SEQ ID NO: 4517 - DNA, 15 bp, synthetic construct
  source 1..15: mol_type = other DNA
gattttcaggttctt

SEQ ID NO: 4518 - DNA, 15 bp, synthetic construct
  source 1..15: mol_type = other DNA
acccaaatgatttgc

SEQ ID NO: 4519 - DNA, 15 bp, synthetic construct
  source 1..15: mol_type = other DNA
ggttcagctgttgga

SEQ ID NO: 4520 - DNA, 15 bp, synthetic construct
  source 1..15: mol_type = other DNA
gtaatgagctttttg

SEQ ID NO: 4521 - DNA, 15 bp, synthetic construct
  source 1..15: mol_type = other DNA
tagtatgcaaaacta

SEQ ID NO: 4522 - DNA, 15 bp, synthetic construct
  source 1..15: mol_type = other DNA
tgaaatatctcttga

SEQ ID NO: 4523 - DNA, 15 bp, synthetic construct
  source 1..15: mol_type = other DNA
ttctttgctataggt

SEQ ID NO: 4524 - DNA, 15 bp, synthetic construct
  source 1..15: mol_type = other DNA
ggctgattcacttaa

SEQ ID NO: 4525 - DNA, 15 bp, synthetic construct
  source 1..15: mol_type = other DNA
taacctattccatgg

SEQ ID NO: 4526 - DNA, 15 bp, synthetic construct
  source 1..15: mol_type = other DNA
acgaatgcaaatcac

SEQ ID NO: 4527 - DNA, 15 bp, synthetic construct
  source 1..15: mol_type = other DNA
atttcctagtctaaa

SEQ ID NO: 4528 - DNA, 15 bp, synthetic construct
  source 1..15: mol_type = other DNA
aaaacatgaagtgag

SEQ ID NO: 4529 - DNA, 15 bp, synthetic construct
  source 1..15: mol_type = other DNA
tggactgatgatggc

SEQ ID NO: 4530 - DNA, 15 bp, synthetic construct
  source 1..15: mol_type = other DNA
tgtgattggtagctc

SEQ ID NO: 4531 - DNA, 15 bp, synthetic construct
  source 1..15: mol_type = other DNA
tggactgatgatggc

SEQ ID NO: 4532 - DNA, 15 bp, synthetic construct
  source 1..15: mol_type = other DNA
tgtgattggtagctc

SEQ ID NO: 4533 - DNA, 15 bp, synthetic construct
  source 1..15: mol_type = other DNA
atgaaaatggtgtta

SEQ ID NO: 4534 - DNA, 15 bp, synthetic construct
  source 1..15: mol_type = other DNA
aaataagaacagaaa

SEQ ID NO: 4535 - DNA, 15 bp, synthetic construct
  source 1..15: mol_type = other DNA
tgcaaaagcacacct

SEQ ID NO: 4536 - DNA, 15 bp, synthetic construct
  source 1..15: mol_type = other DNA
taacttagcgcgtct

SEQ ID NO: 4537 - DNA, 15 bp, synthetic construct
  source 1..15: mol_type = other DNA
gttgtatagatggtt

SEQ ID NO: 4538 - DNA, 15 bp, synthetic construct
  source 1..15: mol_type = other DNA
atgactgagatcaca

SEQ ID NO: 4539 - DNA, 15 bp, synthetic construct
  source 1..15: mol_type = other DNA
ccattttatttattt

SEQ ID NO: 4540 - DNA, 15 bp, synthetic construct
  source 1..15: mol_type = other DNA
actgacaggatgtcg

SEQ ID NO: 4541 - DNA, 15 bp, synthetic construct
  source 1..15: mol_type = other DNA
agtatttctacattg

SEQ ID NO: 4542 - DNA, 15 bp, synthetic construct
  source 1..15: mol_type = other DNA
aactacaatccttgg

SEQ ID NO: 4543 - DNA, 15 bp, synthetic construct
  source 1..15: mol_type = other DNA
cagtaagctaagcca

SEQ ID NO: 4544 - DNA, 15 bp, synthetic construct
  source 1..15: mol_type = other DNA
tgtatagtgtccttg

SEQ ID NO: 4545 - DNA, 15 bp, synthetic construct
  source 1..15: mol_type = other DNA
cgctacctatgagat

SEQ ID NO: 4546 - DNA, 15 bp, synthetic construct
  source 1..15: mol_type = other DNA
acatcgcaatgctga

SEQ ID NO: 4547 - DNA, 15 bp, synthetic construct
  source 1..15: mol_type = other DNA
cgatgtctgttttat

SEQ ID NO: 4548 - DNA, 15 bp, synthetic construct
  source 1..15: mol_type = other DNA
caaaagaagtgtgtg

SEQ ID NO: 4549 - DNA, 15 bp, synthetic construct
  source 1..15: mol_type = other DNA
agatgacatgtagtc

SEQ ID NO: 4550 - DNA, 15 bp, synthetic construct
  source 1..15: mol_type = other DNA
ctttatttgttccaa

SEQ ID NO: 4551 - DNA, 15 bp, synthetic construct
  source 1..15: mol_type = other DNA
attctgaatgatgag

SEQ ID NO: 4552 - DNA, 15 bp, synthetic construct
  source 1..15: mol_type = other DNA
ggtaacgttctatcg

SEQ ID NO: 4553 - DNA, 15 bp, synthetic construct
  source 1..15: mol_type = other DNA
atagaacgttaccac

SEQ ID NO: 4554 - DNA, 15 bp, synthetic construct
  source 1..15: mol_type = other DNA
tggatacctcttaca

SEQ ID NO: 4555 - DNA, 15 bp, synthetic construct
  source 1..15: mol_type = other DNA
tgtggtaactttgca

SEQ ID NO: 4556 - DNA, 15 bp, synthetic construct
  source 1..15: mol_type = other DNA
cttatcattaatgga

SEQ ID NO: 4557 - DNA, 15 bp, synthetic construct
  source 1..15: mol_type = other DNA
agttgtaattgtgcc

SEQ ID NO: 4558 - DNA, 15 bp, synthetic construct
  source 1..15: mol_type = other DNA
agacataattaggca

SEQ ID NO: 4559 - DNA, 15 bp, synthetic construct
  source 1..15: mol_type = other DNA
tgtttgccttgtgat

SEQ ID NO: 4560 - DNA, 15 bp, synthetic construct
  source 1..15: mol_type = other DNA
tgaaaattgctaaaa

SEQ ID NO: 4561 - DNA, 15 bp, synthetic construct
  source 1..15: mol_type = other DNA
actgtggagccatat

SEQ ID NO: 4562 - DNA, 15 bp, synthetic construct
  source 1..15: mol_type = other DNA
caatcctgttcagaa

SEQ ID NO: 4563 - DNA, 15 bp, synthetic construct
  source 1..15: mol_type = other DNA
actgtggagccatat

SEQ ID NO: 4564 - DNA, 15 bp, synthetic construct
  source 1..15: mol_type = other DNA
caatcctgttcagaa

SEQ ID NO: 4565 - DNA, 15 bp, synthetic construct
  source 1..15: mol_type = other DNA
gcaggctacttttgg

SEQ ID NO: 4566 - DNA, 15 bp, synthetic construct
  source 1..15: mol_type = other DNA
tgtctttctctggtt

SEQ ID NO: 4567 - DNA, 15 bp, synthetic construct
  source 1..15: mol_type = other DNA
cccaaattgacagtg

SEQ ID NO: 4568 - DNA, 15 bp, synthetic construct
  source 1..15: mol_type = other DNA
ggcttacttttatgg

SEQ ID NO: 4569 - DNA, 15 bp, synthetic construct
  source 1..15: mol_type = other DNA
ttgaaaaattttgta

SEQ ID NO: 4570 - DNA, 15 bp, synthetic construct
  source 1..15: mol_type = other DNA
aagagaaccagggaa

SEQ ID NO: 4571 - DNA, 15 bp, synthetic construct
  source 1..15: mol_type = other DNA
aaattttgctcagat

SEQ ID NO: 4572 - DNA, 15 bp, synthetic construct
  source 1..15: mol_type = other DNA
ttattcctgcggagt

SEQ ID NO: 4573 - DNA, 15 bp, synthetic construct
  source 1..15: mol_type = other DNA
tttgttttccctaat

SEQ ID NO: 4574 - DNA, 15 bp, synthetic construct
  source 1..15: mol_type = other DNA
cgataggtatgtagg

SEQ ID NO: 4575 - DNA, 15 bp, synthetic construct
  source 1..15: mol_type = other DNA
tcttgctcggtttaa

SEQ ID NO: 4576 - DNA, 15 bp, synthetic construct
  source 1..15: mol_type = other DNA
tacactactggcaga

SEQ ID NO: 4577 - DNA, 15 bp, synthetic construct
  source 1..15: mol_type = other DNA
gattctaactgcaat

SEQ ID NO: 4578 - DNA, 15 bp, synthetic construct
  source 1..15: mol_type = other DNA
cctacacagaaaagg

SEQ ID NO: 4579 - DNA, 15 bp, synthetic construct
  source 1..15: mol_type = other DNA
ttgcagtaatgtcgt

SEQ ID NO: 4580 - DNA, 15 bp, synthetic construct
  source 1..15: mol_type = other DNA
caatcactcgaatcc

SEQ ID NO: 4581 - DNA, 15 bp, synthetic construct
  source 1..15: mol_type = other DNA
ggatctctaatggca

SEQ ID NO: 4582 - DNA, 15 bp, synthetic construct
  source 1..15: mol_type = other DNA
tcagtggtacttacg

SEQ ID NO: 4583 - DNA, 15 bp, synthetic construct
  source 1..15: mol_type = other DNA
atcacatgaaagggg

SEQ ID NO: 4584 - DNA, 15 bp, synthetic construct
  source 1..15: mol_type = other DNA
ttgtaaatcctccca

SEQ ID NO: 4585 - DNA, 15 bp, synthetic construct
  source 1..15: mol_type = other DNA
gttcagagaccatga

SEQ ID NO: 4586 - DNA, 15 bp, synthetic construct
  source 1..15: mol_type = other DNA
attccctcgatcttc

SEQ ID NO: 4587 - DNA, 15 bp, synthetic construct
  source 1..15: mol_type = other DNA
tcttgcagacattgt

SEQ ID NO: 4588 - DNA, 15 bp, synthetic construct
  source 1..15: mol_type = other DNA
tttcttattgagctt

SEQ ID NO: 4589 - DNA, 15 bp, synthetic construct
  source 1..15: mol_type = other DNA
tgtaagtatctctct

SEQ ID NO: 4590 - DNA, 15 bp, synthetic construct
  source 1..15: mol_type = other DNA
tatgggatactgttt

SEQ ID NO: 4591 - DNA, 15 bp, synthetic construct
  source 1..15: mol_type = other DNA
ttcctcacaggagac

SEQ ID NO: 4592 - DNA, 15 bp, synthetic construct
  source 1..15: mol_type = other DNA
gaaatttgagggata

SEQ ID NO: 4593 - DNA, 15 bp, synthetic construct
  source 1..15: mol_type = other DNA
ttaaaataaagatga

SEQ ID NO: 4594 - DNA, 15 bp, synthetic construct
  source 1..15: mol_type = other DNA
agacaatttgagtct

SEQ ID NO: 4595 - DNA, 15 bp, synthetic construct
  source 1..15: mol_type = other DNA
gctaaaggaatgtta

SEQ ID NO: 4596 - DNA, 15 bp, synthetic construct
  source 1..15: mol_type = other DNA
tacacagtgaaaagc

SEQ ID NO: 4597 - DNA, 15 bp, synthetic construct
  source 1..15: mol_type = other DNA
tccatctatcgagaa

SEQ ID NO: 4598 - DNA, 15 bp, synthetic construct
  source 1..15: mol_type = other DNA
atcttcggcttctac

SEQ ID NO: 4599 - DNA, 15 bp, synthetic construct
  source 1..15: mol_type = other DNA
atgtcaatatttggt

SEQ ID NO: 4600 - DNA, 15 bp, synthetic construct
  source 1..15: mol_type = other DNA
atctgcaaaaatgac

SEQ ID NO: 4601 - DNA, 15 bp, synthetic construct
  source 1..15: mol_type = other DNA
gtctgagcattcttt

SEQ ID NO: 4602 - DNA, 15 bp, synthetic construct
  source 1..15: mol_type = other DNA
aaatgtagagattga

SEQ ID NO: 4603 - DNA, 15 bp, synthetic construct
  source 1..15: mol_type = other DNA
ttgtgcaatttgtct

SEQ ID NO: 4604 - DNA, 15 bp, synthetic construct
  source 1..15: mol_type = other DNA
actcactgagaggtt

SEQ ID NO: 4605 - DNA, 15 bp, synthetic construct
  source 1..15: mol_type = other DNA
cggagtccatgtgcc

SEQ ID NO: 4606 - DNA, 15 bp, synthetic construct
  source 1..15: mol_type = other DNA
gtccctcccctttag

SEQ ID NO: 4607 - DNA, 15 bp, synthetic construct
  source 1..15: mol_type = other DNA
agaaccaagatacag

SEQ ID NO: 4608 - DNA, 15 bp, synthetic construct
  source 1..15: mol_type = other DNA
tcccaagatgaatcg

SEQ ID NO: 4609 - DNA, 15 bp, synthetic construct
  source 1..15: mol_type = other DNA
tttaaccacagtatt

SEQ ID NO: 4610 - DNA, 15 bp, synthetic construct
  source 1..15: mol_type = other DNA
taaggctaaagaacg

SEQ ID NO: 4611 - DNA, 15 bp, synthetic construct
  source 1..15: mol_type = other DNA
ggtgtgtttatgaag

SEQ ID NO: 4612 - DNA, 15 bp, synthetic construct
  source 1..15: mol_type = other DNA
aactatgaagggaca

SEQ ID NO: 4613 - DNA, 15 bp, synthetic construct
  source 1..15: mol_type = other DNA
tcatcttcctaggtg

SEQ ID NO: 4614 - DNA, 15 bp, synthetic construct
  source 1..15: mol_type = other DNA
ctagtcatctgcctt

SEQ ID NO: 4615 - DNA, 15 bp, synthetic construct
  source 1..15: mol_type = other DNA
agggtgacatccata

SEQ ID NO: 4616 - DNA, 15 bp, synthetic construct
  source 1..15: mol_type = other DNA
taaacatcctacttg

SEQ ID NO: 4617 - DNA, 15 bp, synthetic construct
  source 1..15: mol_type = other DNA
atgattgttgaccat

SEQ ID NO: 4618 - DNA, 15 bp, synthetic construct
  source 1..15: mol_type = other DNA
aagatgacaggagac

SEQ ID NO: 4619 - DNA, 15 bp, synthetic construct
  source 1..15: mol_type = other DNA
tgtgttattgaaaag

SEQ ID NO: 4620 - DNA, 15 bp, synthetic construct
  source 1..15: mol_type = other DNA
tgttgtctgcacgta

SEQ ID NO: 4621 - DNA, 15 bp, synthetic construct
  source 1..15: mol_type = other DNA
ttccacaggaacctt

SEQ ID NO: 4622 - DNA, 15 bp, synthetic construct
  source 1..15: mol_type = other DNA
agcacattgtagacc

SEQ ID NO: 4623 - DNA, 15 bp, synthetic construct
  source 1..15: mol_type = other DNA
gttatagcctttgct

SEQ ID NO: 4624 - DNA, 15 bp, synthetic construct
  source 1..15: mol_type = other DNA
atgaccgtacctcat

SEQ ID NO: 4625 - DNA, 15 bp, synthetic construct
  source 1..15: mol_type = other DNA
tgtgaagcatgtaca

SEQ ID NO: 4626 - DNA, 15 bp, synthetic construct
  source 1..15: mol_type = other DNA
agtcatctcagctac

SEQ ID NO: 4627 - DNA, 15 bp, synthetic construct
  source 1..15: mol_type = other DNA
taagggttttcactc

SEQ ID NO: 4628 - DNA, 15 bp, synthetic construct
  source 1..15: mol_type = other DNA
ctcatcatgaatggc

SEQ ID NO: 4629 - DNA, 15 bp, synthetic construct
  source 1..15: mol_type = other DNA
atgtttgcattctct

SEQ ID NO: 4630 - DNA, 15 bp, synthetic construct
  source 1..15: mol_type = other DNA
tgggctgtactattt

SEQ ID NO: 4631 - DNA, 15 bp, synthetic construct
  source 1..15: mol_type = other DNA
aatgagaagaaaaaa

SEQ ID NO: 4632 - DNA, 15 bp, synthetic construct
  source 1..15: mol_type = other DNA
tataaaggttctaca

SEQ ID NO: 4633 - DNA, 15 bp, synthetic construct
  source 1..15: mol_type = other DNA
gctaaagtagagttt

SEQ ID NO: 4634 - DNA, 15 bp, synthetic construct
  source 1..15: mol_type = other DNA
aacgtgtgaagtatt

SEQ ID NO: 4635 - DNA, 15 bp, synthetic construct
  source 1..15: mol_type = other DNA
ctcattttggtagcc

SEQ ID NO: 4636 - DNA, 15 bp, synthetic construct
  source 1..15: mol_type = other DNA
tccaaatacaaagcg

SEQ ID NO: 4637 - DNA, 15 bp, synthetic construct
  source 1..15: mol_type = other DNA
ttgttattaaagaca

SEQ ID NO: 4638 - DNA, 15 bp, synthetic construct
  source 1..15: mol_type = other DNA
tgtcagtagaagaca

SEQ ID NO: 4639 - DNA, 15 bp, synthetic construct
  source 1..15: mol_type = other DNA
tgacaccacactggc

SEQ ID NO: 4640 - DNA, 15 bp, synthetic construct
  source 1..15: mol_type = other DNA
ctagagcaaaggaaa

SEQ ID NO: 4641 - DNA, 15 bp, synthetic construct
  source 1..15: mol_type = other DNA
atcaaaggctgcttt

SEQ ID NO: 4642 - DNA, 15 bp, synthetic construct
  source 1..15: mol_type = other DNA
gttggaaaataagga

SEQ ID NO: 4643 - DNA, 15 bp, synthetic construct
  source 1..15: mol_type = other DNA
gggcatttttgtcga

SEQ ID NO: 4644 - DNA, 15 bp, synthetic construct
  source 1..15: mol_type = other DNA
aggtgcctttttcac

SEQ ID NO: 4645 - DNA, 15 bp, synthetic construct
  source 1..15: mol_type = other DNA
gctaaatggttcctg

SEQ ID NO: 4646 - DNA, 15 bp, synthetic construct
  source 1..15: mol_type = other DNA
agttccaggaatgac

SEQ ID NO: 4647 - DNA, 15 bp, synthetic construct
  source 1..15: mol_type = other DNA
tgaataatcttcatt

SEQ ID NO: 4648 - DNA, 15 bp, synthetic construct
  source 1..15: mol_type = other DNA
agtgaccaacaaagc

SEQ ID NO: 4649 - DNA, 15 bp, synthetic construct
  source 1..15: mol_type = other DNA
aacaagtccaaaccg

SEQ ID NO: 4650 - DNA, 15 bp, synthetic construct
  source 1..15: mol_type = other DNA
ccaacaaagctccct

SEQ ID NO: 4651 - DNA, 15 bp, synthetic construct
  source 1..15: mol_type = other DNA
atgactagatagcga

SEQ ID NO: 4652 - DNA, 15 bp, synthetic construct
  source 1..15: mol_type = other DNA
tctgagttaacacac

SEQ ID NO: 4653 - DNA, 15 bp, synthetic construct
  source 1..15: mol_type = other DNA
cttggatctcttttg

SEQ ID NO: 4654 - DNA, 15 bp, synthetic construct
  source 1..15: mol_type = other DNA
gcccatatccttatg

SEQ ID NO: 4655 - DNA, 15 bp, synthetic construct
  source 1..15: mol_type = other DNA
ttttagccaaacatt

SEQ ID NO: 4656 - DNA, 15 bp, synthetic construct
  source 1..15: mol_type = other DNA
cactcttcacatgtc

SEQ ID NO: 4657 - DNA, 15 bp, synthetic construct
  source 1..15: mol_type = other DNA
ttcctcttcattcct

SEQ ID NO: 4658 - DNA, 15 bp, synthetic construct
  source 1..15: mol_type = other DNA
aaagatctgttactg

SEQ ID NO: 4659 - DNA, 15 bp, synthetic construct
  source 1..15: mol_type = other DNA
cctaaattatagaat

SEQ ID NO: 4660 - DNA, 15 bp, synthetic construct
  source 1..15: mol_type = other DNA
tagcagccaccgttg

SEQ ID NO: 4661 - DNA, 15 bp, synthetic construct
  source 1..15: mol_type = other DNA
cctgacttcatctac

SEQ ID NO: 4662 - DNA, 15 bp, synthetic construct
  source 1..15: mol_type = other DNA
tgatgaggtcaaagc

SEQ ID NO: 4663 - DNA, 15 bp, synthetic construct
  source 1..15: mol_type = other DNA
tgcttgctgtgactt

SEQ ID NO: 4664 - DNA, 15 bp, synthetic construct
  source 1..15: mol_type = other DNA
tcctttggaatttgg

SEQ ID NO: 4665 - DNA, 15 bp, synthetic construct
  source 1..15: mol_type = other DNA
aggcttttctcctta

SEQ ID NO: 4666 - DNA, 15 bp, synthetic construct
  source 1..15: mol_type = other DNA
aagcaagcatgcaag

SEQ ID NO: 4667 - DNA, 15 bp, synthetic construct
  source 1..15: mol_type = other DNA
atgcatcaattttgt

SEQ ID NO: 4668 - DNA, 15 bp, synthetic construct
  source 1..15: mol_type = other DNA
gttctgtcaataacc

SEQ ID NO: 4669 - DNA, 15 bp, synthetic construct
  source 1..15: mol_type = other DNA
actctgctggtaacc

SEQ ID NO: 4670 - DNA, 15 bp, synthetic construct
  source 1..15: mol_type = other DNA
gaaataatcattgtc

SEQ ID NO: 4671 - DNA, 15 bp, synthetic construct
  source 1..15: mol_type = other DNA
tcctcctagaactcc

SEQ ID NO: 4672 - DNA, 15 bp, synthetic construct
  source 1..15: mol_type = other DNA
gcgctgtattatttg

SEQ ID NO: 4673 - DNA, 15 bp, synthetic construct
  source 1..15: mol_type = other DNA
ttcaacaggcaacaa

SEQ ID NO: 4674 - DNA, 15 bp, synthetic construct
  source 1..15: mol_type = other DNA
ccttcctataggtct

SEQ ID NO: 4675 - DNA, 15 bp, synthetic construct
  source 1..15: mol_type = other DNA
tcctcaggtaaagtt

SEQ ID NO: 4676 - DNA, 15 bp, synthetic construct
  source 1..15: mol_type = other DNA
gtttagtcatcaaga

SEQ ID NO: 4677 - DNA, 15 bp, synthetic construct
  source 1..15: mol_type = other DNA
catgtgaacatttaa

SEQ ID NO: 4678 - DNA, 15 bp, synthetic construct
  source 1..15: mol_type = other DNA
gatgaggatgtttct

SEQ ID NO: 4679 - DNA, 15 bp, synthetic construct
  source 1..15: mol_type = other DNA
ttagatgaagtaggc

SEQ ID NO: 4680 - DNA, 15 bp, synthetic construct
  source 1..15: mol_type = other DNA
cacagaaatggtgct

SEQ ID NO: 4681 - DNA, 15 bp, synthetic construct
  source 1..15: mol_type = other DNA
ctggtgaacaatgta

SEQ ID NO: 4682 - DNA, 15 bp, synthetic construct
  source 1..15: mol_type = other DNA
acttttatattcagc

SEQ ID NO: 4683 - DNA, 15 bp, synthetic construct
  source 1..15: mol_type = other DNA
ttctttgttgaactc

SEQ ID NO: 4684 - DNA, 15 bp, synthetic construct
  source 1..15: mol_type = other DNA
tatgagagtgtacag

SEQ ID NO: 4685 - DNA, 15 bp, synthetic construct
  source 1..15: mol_type = other DNA
accattcttgcagat

SEQ ID NO: 4686 - DNA, 15 bp, synthetic construct
  source 1..15: mol_type = other DNA
gaactgttgctaact

SEQ ID NO: 4687 - DNA, 15 bp, synthetic construct
  source 1..15: mol_type = other DNA
tatattcctcatgct

SEQ ID NO: 4688 - DNA, 15 bp, synthetic construct
  source 1..15: mol_type = other DNA
actctttcttgtgct

SEQ ID NO: 4689 - DNA, 15 bp, synthetic construct
  source 1..15: mol_type = other DNA
tgtagtttaaatgaa

SEQ ID NO: 4690 - DNA, 15 bp, synthetic construct
  source 1..15: mol_type = other DNA
tcataaaattatcac

SEQ ID NO: 4691 - DNA, 15 bp, synthetic construct
  source 1..15: mol_type = other DNA
gttaatctggcttgg

SEQ ID NO: 4692 - DNA, 15 bp, synthetic construct
  source 1..15: mol_type = other DNA
gcctatcagcagaag

SEQ ID NO: 4693 - DNA, 15 bp, synthetic construct
  source 1..15: mol_type = other DNA
agggagagatatcgg

SEQ ID NO: 4694 - DNA, 15 bp, synthetic construct
  source 1..15: mol_type = other DNA
ccccctttgctatgg

SEQ ID NO: 4695 - DNA, 15 bp, synthetic construct
  source 1..15: mol_type = other DNA
ttccaaaatccaact

SEQ ID NO: 4696 - DNA, 15 bp, synthetic construct
  source 1..15: mol_type = other DNA
cttattaaagtggtg

SEQ ID NO: 4697 - DNA, 15 bp, synthetic construct
  source 1..15: mol_type = other DNA
tttctttcaagacag

SEQ ID NO: 4698 - DNA, 15 bp, synthetic construct
  source 1..15: mol_type = other DNA
gtttaaagccaacta

SEQ ID NO: 4699 - DNA, 15 bp, synthetic construct
  source 1..15: mol_type = other DNA
tggtctttcccatac

SEQ ID NO: 4700 - DNA, 15 bp, synthetic construct
  source 1..15: mol_type = other DNA
tgcagttggatccct

SEQ ID NO: 4701 - DNA, 15 bp, synthetic construct
  source 1..15: mol_type = other DNA
ttttcccggaggtaa

SEQ ID NO: 4702 - DNA, 15 bp, synthetic construct
  source 1..15: mol_type = other DNA
accttcggaatgatg

SEQ ID NO: 4703 - DNA, 15 bp, synthetic construct
  source 1..15: mol_type = other DNA
gttggcggaatttgc

SEQ ID NO: 4704 - DNA, 15 bp, synthetic construct
  source 1..15: mol_type = other DNA
aatacaaaacaatca

SEQ ID NO: 4705 - DNA, 15 bp, synthetic construct
  source 1..15: mol_type = other DNA
gaagcttttaagatt

SEQ ID NO: 4706 - DNA, 15 bp, synthetic construct
  source 1..15: mol_type = other DNA
ggtcaactcactcac

SEQ ID NO: 4707 - DNA, 15 bp, synthetic construct
  source 1..15: mol_type = other DNA
attgtccaggatgtg

SEQ ID NO: 4708 - DNA, 15 bp, synthetic construct
  source 1..15: mol_type = other DNA
cccttcactgacttt

SEQ ID NO: 4709 - DNA, 15 bp, synthetic construct
  source 1..15: mol_type = other DNA
gatttagtgaatgta

SEQ ID NO: 4710 - DNA, 15 bp, synthetic construct
  source 1..15: mol_type = other DNA
agcttttcccttgtc

SEQ ID NO: 4711 - DNA, 15 bp, synthetic construct
  source 1..15: mol_type = other DNA
gaatgaaagcctgtg

SEQ ID NO: 4712 - DNA, 15 bp, synthetic construct
  source 1..15: mol_type = other DNA
ttctacaagctcata

SEQ ID NO: 4713 - DNA, 15 bp, synthetic construct
  source 1..15: mol_type = other DNA
cctataaaacacaaa

SEQ ID NO: 4714 - DNA, 15 bp, synthetic construct
  source 1..15: mol_type = other DNA
gacatttggcacacc

SEQ ID NO: 4715 - DNA, 15 bp, synthetic construct
  source 1..15: mol_type = other DNA
gccatgtgtttcagg

SEQ ID NO: 4716 - DNA, 15 bp, synthetic construct
  source 1..15: mol_type = other DNA
tctccaaaagtatga

SEQ ID NO: 4717 - DNA, 15 bp, synthetic construct
  source 1..15: mol_type = other DNA
ctgctgttgtggatc

SEQ ID NO: 4718 - DNA, 15 bp, synthetic construct
  source 1..15: mol_type = other DNA
ggcagagtcagacat

SEQ ID NO: 4719 - DNA, 15 bp, synthetic construct
  source 1..15: mol_type = other DNA
aatgtggctcatctt

SEQ ID NO: 4720 - DNA, 15 bp, synthetic construct
  source 1..15: mol_type = other DNA
agagcttaaacaagt

SEQ ID NO: 4721 - DNA, 15 bp, synthetic construct
  source 1..15: mol_type = other DNA
ggaagaagggttgag

SEQ ID NO: 4722 - DNA, 15 bp, synthetic construct
  source 1..15: mol_type = other DNA
caactccatcatagg

SEQ ID NO: 4723 - DNA, 15 bp, synthetic construct
  source 1..15: mol_type = other DNA
tctctgtgtcctagg

SEQ ID NO: 4724 - DNA, 15 bp, synthetic construct
  source 1..15: mol_type = other DNA
agagctgcaacgttc

SEQ ID NO: 4725 - DNA, 15 bp, synthetic construct
  source 1..15: mol_type = other DNA
agtcagggaacccaa

SEQ ID NO: 4726 - DNA, 15 bp, synthetic construct
  source 1..15: mol_type = other DNA
gtaatgttccctcat

SEQ ID NO: 4727 - DNA, 15 bp, synthetic construct
  source 1..15: mol_type = other DNA
agttgcatgttcctt

SEQ ID NO: 4728 - DNA, 15 bp, synthetic construct
  source 1..15: mol_type = other DNA
ggctgttaaaaatac

SEQ ID NO: 4729 - DNA, 15 bp, synthetic construct
  source 1..15: mol_type = other DNA
aattactgcatcctg

SEQ ID NO: 4730 - DNA, 15 bp, synthetic construct
  source 1..15: mol_type = other DNA
tctctgagctttttg

SEQ ID NO: 4731 - DNA, 15 bp, synthetic construct
  source 1..15: mol_type = other DNA
tctgaaggatgtaag

SEQ ID NO: 4732 - DNA, 15 bp, synthetic construct
  source 1..15: mol_type = other DNA
tgcagtaacttggta

SEQ ID NO: 4733 - DNA, 15 bp, synthetic construct
  source 1..15: mol_type = other DNA
tttcagttcattgcc

SEQ ID NO: 4734 - DNA, 15 bp, synthetic construct
  source 1..15: mol_type = other DNA
ctccttgacaatact

SEQ ID NO: 4735 - DNA, 15 bp, synthetic construct
  source 1..15: mol_type = other DNA
tctgtttgggacctg

SEQ ID NO: 4736 - DNA, 15 bp, synthetic construct
  source 1..15: mol_type = other DNA
acctgcacaggaatg

SEQ ID NO: 4737 - DNA, 15 bp, synthetic construct
  source 1..15: mol_type = other DNA
ttctaccaagatcgc

SEQ ID NO: 4738 - DNA, 15 bp, synthetic construct
  source 1..15: mol_type = other DNA
acactgttctcctca

SEQ ID NO: 4739 - DNA, 15 bp, synthetic construct
  source 1..15: mol_type = other DNA
tctgccgtagattac

SEQ ID NO: 4740 - DNA, 15 bp, synthetic construct
  source 1..15: mol_type = other DNA
gctggaaaagaaaaa

SEQ ID NO: 4741 - DNA, 15 bp, synthetic construct
  source 1..15: mol_type = other DNA
ctttctctgatgggt

SEQ ID NO: 4742 - DNA, 15 bp, synthetic construct
  source 1..15: mol_type = other DNA
tagcaacatataaca

SEQ ID NO: 4743 - DNA, 15 bp, synthetic construct
  source 1..15: mol_type = other DNA
ctttattcacccatg

SEQ ID NO: 4744 - DNA, 15 bp, synthetic construct
  source 1..15: mol_type = other DNA
tcttgtgggatagcc

SEQ ID NO: 4745 - DNA, 15 bp, synthetic construct
  source 1..15: mol_type = other DNA
aaggctgcatttggt

SEQ ID NO: 4746 - DNA, 15 bp, synthetic construct
  source 1..15: mol_type = other DNA
aatgggctctacact

SEQ ID NO: 4747 - DNA, 15 bp, synthetic construct
  source 1..15: mol_type = other DNA
tttgcagcctgtcac

SEQ ID NO: 4748 - DNA, 15 bp, synthetic construct
  source 1..15: mol_type = other DNA
agaggctacctaaca

SEQ ID NO: 4749 - DNA, 15 bp, synthetic construct
  source 1..15: mol_type = other DNA
ctgtctgtgtcacgt

SEQ ID NO: 4750 - DNA, 15 bp, synthetic construct
  source 1..15: mol_type = other DNA
ctctgaagacaaaac

SEQ ID NO: 4751 - DNA, 15 bp, synthetic construct
  source 1..15: mol_type = other DNA
gagctgctaattcca

SEQ ID NO: 4752 - DNA, 15 bp, synthetic construct
  source 1..15: mol_type = other DNA
agcctggtatgaaga

SEQ ID NO: 4753 - DNA, 15 bp, synthetic construct
  source 1..15: mol_type = other DNA
tttgtaattgaaatc

SEQ ID NO: 4754 - DNA, 15 bp, synthetic construct
  source 1..15: mol_type = other DNA
cttttacaagctcct

SEQ ID NO: 4755 - DNA, 15 bp, synthetic construct
  source 1..15: mol_type = other DNA
ttcaggatactatgc

SEQ ID NO: 4756 - DNA, 15 bp, synthetic construct
  source 1..15: mol_type = other DNA
aaccatgatgtcaga

SEQ ID NO: 4757 - DNA, 15 bp, synthetic construct
  source 1..15: mol_type = other DNA
tgtgtctctttttcc

SEQ ID NO: 4758 - DNA, 15 bp, synthetic construct
  source 1..15: mol_type = other DNA
agtaagaacctcgca

SEQ ID NO: 4759 - DNA, 15 bp, synthetic construct
  source 1..15: mol_type = other DNA
tcagtatttgcaatt

SEQ ID NO: 4760 - DNA, 15 bp, synthetic construct
  source 1..15: mol_type = other DNA
gtggtatcactgtgt

SEQ ID NO: 4761 - DNA, 15 bp, synthetic construct
  source 1..15: mol_type = other DNA
ataatctaatgcaga

SEQ ID NO: 4762 - DNA, 15 bp, synthetic construct
  source 1..15: mol_type = other DNA
aacagtacaaatcag

SEQ ID NO: 4763 - DNA, 15 bp, synthetic construct
  source 1..15: mol_type = other DNA
tgatgacttgacttt

SEQ ID NO: 4764 - DNA, 15 bp, synthetic construct
  source 1..15: mol_type = other DNA
tacctgagagtcagc

SEQ ID NO: 4765 - DNA, 15 bp, synthetic construct
  source 1..15: mol_type = other DNA
tttgtcgctggtgtt

SEQ ID NO: 4766 - DNA, 15 bp, synthetic construct
  source 1..15: mol_type = other DNA
cagccttcacataga

SEQ ID NO: 4767 - DNA, 15 bp, synthetic construct
  source 1..15: mol_type = other DNA
aagcttgacctttgg

SEQ ID NO: 4768 - DNA, 15 bp, synthetic construct
  source 1..15: mol_type = other DNA
tttccagctaaaacg

SEQ ID NO: 4769 - DNA, 15 bp, synthetic construct
  source 1..15: mol_type = other DNA
ctggatttttccctc

SEQ ID NO: 4770 - DNA, 15 bp, synthetic construct
  source 1..15: mol_type = other DNA
agcaatgatggaaag

SEQ ID NO: 4771 - DNA, 15 bp, synthetic construct
  source 1..15: mol_type = other DNA
ccaaattcttaccta

SEQ ID NO: 4772 - DNA, 15 bp, synthetic construct
  source 1..15: mol_type = other DNA
agatttcgtgcttga

SEQ ID NO: 4773 - DNA, 15 bp, synthetic construct
  source 1..15: mol_type = other DNA
tggattgtcctttct

SEQ ID NO: 4774 - DNA, 15 bp, synthetic construct
  source 1..15: mol_type = other DNA
ttcatccagctggaa

SEQ ID NO: 4775 - DNA, 15 bp, synthetic construct
  source 1..15: mol_type = other DNA
tcattgaaataatcg

SEQ ID NO: 4776 - DNA, 15 bp, synthetic construct
  source 1..15: mol_type = other DNA
aaagaaactgtaact

SEQ ID NO: 4777 - DNA, 15 bp, synthetic construct
  source 1..15: mol_type = other DNA
aacaacagaactgga

SEQ ID NO: 4778 - DNA, 15 bp, synthetic construct
  source 1..15: mol_type = other DNA
taatcttgtagatga

SEQ ID NO: 4779 - DNA, 15 bp, synthetic construct
  source 1..15: mol_type = other DNA
ttgtggctaattcga

SEQ ID NO: 4780 - DNA, 15 bp, synthetic construct
  source 1..15: mol_type = other DNA
gctcagttcattgga

SEQ ID NO: 4781 - DNA, 15 bp, synthetic construct
  source 1..15: mol_type = other DNA
ctcactaactatgtg

SEQ ID NO: 4782 - DNA, 15 bp, synthetic construct
  source 1..15: mol_type = other DNA
ttggattcatcagac

SEQ ID NO: 4783 - DNA, 15 bp, synthetic construct
  source 1..15: mol_type = other DNA
tgctcaatagaagat

SEQ ID NO: 4784 - DNA, 15 bp, synthetic construct
  source 1..15: mol_type = other DNA
atacaaaaccaggac

SEQ ID NO: 4785 - DNA, 15 bp, synthetic construct
  source 1..15: mol_type = other DNA
tttcataccatgtgt

SEQ ID NO: 4786 - DNA, 15 bp, synthetic construct
  source 1..15: mol_type = other DNA
agacaaaactccaga

SEQ ID NO: 4787 - DNA, 15 bp, synthetic construct
  source 1..15: mol_type = other DNA
ccctttccttaaata

SEQ ID NO: 4788 - DNA, 15 bp, synthetic construct
  source 1..15: mol_type = other DNA
actttgccctggtta

SEQ ID NO: 4789 - DNA, 15 bp, synthetic construct
  source 1..15: mol_type = other DNA
atccggtatttcacg

SEQ ID NO: 4790 - DNA, 15 bp, synthetic construct
  source 1..15: mol_type = other DNA
tattggctgacaggt

SEQ ID NO: 4791 - DNA, 15 bp, synthetic construct
  source 1..15: mol_type = other DNA
atgacctggtgatct

SEQ ID NO: 4792 - DNA, 15 bp, synthetic construct
  source 1..15: mol_type = other DNA
ctaataaggaaagaa

SEQ ID NO: 4793 - DNA, 15 bp, synthetic construct
  source 1..15: mol_type = other DNA
accagactacaagtt

SEQ ID NO: 4794 - DNA, 15 bp, synthetic construct
  source 1..15: mol_type = other DNA
aagccatgtttctat

SEQ ID NO: 4795 - DNA, 15 bp, synthetic construct
  source 1..15: mol_type = other DNA
aacatacgctttctc

SEQ ID NO: 4796 - DNA, 15 bp, synthetic construct
  source 1..15: mol_type = other DNA
gtctgagacacataa

SEQ ID NO: 4797 - DNA, 15 bp, synthetic construct
  source 1..15: mol_type = other DNA
tggagaaactaatta

SEQ ID NO: 4798 - DNA, 15 bp, synthetic construct
  source 1..15: mol_type = other DNA
catcatgtatatact

SEQ ID NO: 4799 - DNA, 15 bp, synthetic construct
  source 1..15: mol_type = other DNA
tatgaggatgttgag

SEQ ID NO: 4800 - DNA, 15 bp, synthetic construct
  source 1..15: mol_type = other DNA
caaatggaagaactt

SEQ ID NO: 4801 - DNA, 15 bp, synthetic construct
  source 1..15: mol_type = other DNA
ataatcactaggtca

SEQ ID NO: 4802 - DNA, 15 bp, synthetic construct
  source 1..15: mol_type = other DNA
ctcatcgtgttttct

SEQ ID NO: 4803 - DNA, 15 bp, synthetic construct
  source 1..15: mol_type = other DNA
aatgtgcgttcatgt

SEQ ID NO: 4804 - DNA, 15 bp, synthetic construct
  source 1..15: mol_type = other DNA
ccagttgctgaaata

SEQ ID NO: 4805 - DNA, 15 bp, synthetic construct
  source 1..15: mol_type = other DNA
ctggcttgtcatcgt

SEQ ID NO: 4806 - DNA, 15 bp, synthetic construct
  source 1..15: mol_type = other DNA
tctctatagtactca

SEQ ID NO: 4807 - DNA, 15 bp, synthetic construct
  source 1..15: mol_type = other DNA
tcaccaaggactctc

SEQ ID NO: 4808 - DNA, 15 bp, synthetic construct
  source 1..15: mol_type = other DNA
catctttagctggaa

SEQ ID NO: 4809 - DNA, 15 bp, synthetic construct
  source 1..15: mol_type = other DNA
gcaggaattgataga

SEQ ID NO: 4810 - DNA, 15 bp, synthetic construct
  source 1..15: mol_type = other DNA
aaagtctttacctca

SEQ ID NO: 4811 - DNA, 15 bp, synthetic construct
  source 1..15: mol_type = other DNA
ggcatcatttcctat

SEQ ID NO: 4812 - DNA, 15 bp, synthetic construct
  source 1..15: mol_type = other DNA
caatcttctttgctt

SEQ ID NO: 4813 - DNA, 15 bp, synthetic construct
  source 1..15: mol_type = other DNA
gtgcattttctttct

SEQ ID NO: 4814 - DNA, 15 bp, synthetic construct
  source 1..15: mol_type = other DNA
aattaagaagctttt

SEQ ID NO: 4815 - DNA, 15 bp, synthetic construct
  source 1..15: mol_type = other DNA
ttctacccagactca

SEQ ID NO: 4816 - DNA, 15 bp, synthetic construct
  source 1..15: mol_type = other DNA
gaactcatccacgac

SEQ ID NO: 4817 - DNA, 15 bp, synthetic construct
  source 1..15: mol_type = other DNA
gggagagttttagtc

SEQ ID NO: 4818 - DNA, 15 bp, synthetic construct
  source 1..15: mol_type = other DNA
aaaccatggccactc

SEQ ID NO: 4819 - DNA, 15 bp, synthetic construct
  source 1..15: mol_type = other DNA
agatccaatgaatat

SEQ ID NO: 4820 - DNA, 15 bp, synthetic construct
  source 1..15: mol_type = other DNA
agaaatttgctccag

SEQ ID NO: 4821 - DNA, 15 bp, synthetic construct
  source 1..15: mol_type = other DNA
ccgttctcttccaag

SEQ ID NO: 4822 - DNA, 15 bp, synthetic construct
  source 1..15: mol_type = other DNA
tgtaggtgcagtcca

SEQ ID NO: 4823 - DNA, 15 bp, synthetic construct
  source 1..15: mol_type = other DNA
agcagtgtcaaagcg

SEQ ID NO: 4824 - DNA, 15 bp, synthetic construct
  source 1..15: mol_type = other DNA
ctagaatgctgatgg

SEQ ID NO: 4825 - DNA, 15 bp, synthetic construct
  source 1..15: mol_type = other DNA
gttgatggagaaggc

SEQ ID NO: 4826 - DNA, 15 bp, synthetic construct
  source 1..15: mol_type = other DNA
gagtcatctctaggc

SEQ ID NO: 4827 - DNA, 15 bp, synthetic construct
  source 1..15: mol_type = other DNA
agaattaaagaaagg

SEQ ID NO: 4828 - DNA, 15 bp, synthetic construct
  source 1..15: mol_type = other DNA
gacttacctggtgat

SEQ ID NO: 4829 - DNA, 15 bp, synthetic construct
  source 1..15: mol_type = other DNA
tctacagaatcacca

SEQ ID NO: 4830 - DNA, 15 bp, synthetic construct
  source 1..15: mol_type = other DNA
aatcattaagcacct

SEQ ID NO: 4831 - DNA, 15 bp, synthetic construct
  source 1..15: mol_type = other DNA
ccctagccttagata

SEQ ID NO: 4832 - DNA, 15 bp, synthetic construct
  source 1..15: mol_type = other DNA
actcaaagaagatgg

SEQ ID NO: 4833 - DNA, 15 bp, synthetic construct
  source 1..15: mol_type = other DNA
agtagagagcaccta

SEQ ID NO: 4834 - DNA, 15 bp, synthetic construct
  source 1..15: mol_type = other DNA
tttagccagagaacc

SEQ ID NO: 4835 - DNA, 15 bp, synthetic construct
  source 1..15: mol_type = other DNA
cactcactcttttgg

SEQ ID NO: 4836 - DNA, 15 bp, synthetic construct
  source 1..15: mol_type = other DNA
atcagaaacagtgaa

SEQ ID NO: 4837 - DNA, 15 bp, synthetic construct
  source 1..15: mol_type = other DNA
ccagaaccgggtcag

SEQ ID NO: 4838 - DNA, 15 bp, synthetic construct
  source 1..15: mol_type = other DNA
tgcccaaggtcaatc

SEQ ID NO: 4839 - DNA, 15 bp, synthetic construct
  source 1..15: mol_type = other DNA
tcaggtacttgtgaa

SEQ ID NO: 4840 - DNA, 15 bp, synthetic construct
  source 1..15: mol_type = other DNA
gatgtagcccaagtt

SEQ ID NO: 4841 - DNA, 15 bp, synthetic construct
  source 1..15: mol_type = other DNA
ttcctgctttattcc

SEQ ID NO: 4842 - DNA, 15 bp, synthetic construct
  source 1..15: mol_type = other DNA
attagcatagatttc

SEQ ID NO: 4843 - DNA, 15 bp, synthetic construct
  source 1..15: mol_type = other DNA
aagctgtcgttacat

SEQ ID NO: 4844 - DNA, 15 bp, synthetic construct
  source 1..15: mol_type = other DNA
tgattgatttctcaa

SEQ ID NO: 4845 - DNA, 15 bp, synthetic construct
  source 1..15: mol_type = other DNA
aatgccaagaaccaa

SEQ ID NO: 4846 - DNA, 15 bp, synthetic construct
  source 1..15: mol_type = other DNA
tactctacatagtcc

SEQ ID NO: 4847 - DNA, 15 bp, synthetic construct
  source 1..15: mol_type = other DNA
acaatgtcagtgaga

SEQ ID NO: 4848 - DNA, 15 bp, synthetic construct
  source 1..15: mol_type = other DNA
tgggaagaagtagga

SEQ ID NO: 4849 - DNA, 15 bp, synthetic construct
  source 1..15: mol_type = other DNA
tgttggttcctttgt

SEQ ID NO: 4850 - DNA, 15 bp, synthetic construct
  source 1..15: mol_type = other DNA
tgcaaacagaaaacc

SEQ ID NO: 4851 - DNA, 15 bp, synthetic construct
  source 1..15: mol_type = other DNA
gagcgagaggacacc

SEQ ID NO: 4852 - DNA, 15 bp, synthetic construct
  source 1..15: mol_type = other DNA
tgtcacctgtggaac

SEQ ID NO: 4853 - DNA, 15 bp, synthetic construct
  source 1..15: mol_type = other DNA
actcattcaaatgct

SEQ ID NO: 4854 - DNA, 15 bp, synthetic construct
  source 1..15: mol_type = other DNA
ctcaaactcttcttc

SEQ ID NO: 4855 - DNA, 15 bp, synthetic construct
  source 1..15: mol_type = other DNA
catgcttattgatga

SEQ ID NO: 4856 - DNA, 15 bp, synthetic construct
  source 1..15: mol_type = other DNA
aaggagaaaactgct

SEQ ID NO: 4857 - DNA, 15 bp, synthetic construct
  source 1..15: mol_type = other DNA
ttgaccattaaaatc

SEQ ID NO: 4858 - DNA, 15 bp, synthetic construct
  source 1..15: mol_type = other DNA
acattcacaaaccga

SEQ ID NO: 4859 - DNA, 15 bp, synthetic construct
  source 1..15: mol_type = other DNA
tttgccctagtcaag

SEQ ID NO: 4860 - DNA, 15 bp, synthetic construct
  source 1..15: mol_type = other DNA
cctaccagctggcat

SEQ ID NO: 4861 - DNA, 15 bp, synthetic construct
  source 1..15: mol_type = other DNA
gctttggaatctgct

SEQ ID NO: 4862 - DNA, 15 bp, synthetic construct
  source 1..15: mol_type = other DNA
tcatagctcaggtct

SEQ ID NO: 4863 - DNA, 15 bp, synthetic construct
  source 1..15: mol_type = other DNA
gctcctagtgaagga

SEQ ID NO: 4864 - DNA, 15 bp, synthetic construct
  source 1..15: mol_type = other DNA
atctttcagccacca

SEQ ID NO: 4865 - DNA, 15 bp, synthetic construct
  source 1..15: mol_type = other DNA
aatcactgatatctt

SEQ ID NO: 4866 - DNA, 15 bp, synthetic construct
  source 1..15: mol_type = other DNA
cctcaacctaagagt

SEQ ID NO: 4867 - DNA, 15 bp, synthetic construct
  source 1..15: mol_type = other DNA
ttgttttcctaacca

SEQ ID NO: 4868 - DNA, 15 bp, synthetic construct
  source 1..15: mol_type = other DNA
acagattgaggttgg

SEQ ID NO: 4869 - DNA, 15 bp, synthetic construct
  source 1..15: mol_type = other DNA
tttggtctgtaaaaa

SEQ ID NO: 4870 - DNA, 15 bp, synthetic construct
  source 1..15: mol_type = other DNA
gattcatgccattcc

SEQ ID NO: 4871 - DNA, 15 bp, synthetic construct
  source 1..15: mol_type = other DNA
tggatcatatctttt

SEQ ID NO: 4872 - DNA, 15 bp, synthetic construct
  source 1..15: mol_type = other DNA
cttcagttctcatct

SEQ ID NO: 4873 - DNA, 15 bp, synthetic construct
  source 1..15: mol_type = other DNA
agcccaaccagtaga

SEQ ID NO: 4874 - DNA, 15 bp, synthetic construct
  source 1..15: mol_type = other DNA
cttggtaacttcttc

SEQ ID NO: 4875 - DNA, 15 bp, synthetic construct
  source 1..15: mol_type = other DNA
ttgttgctctttcgc

SEQ ID NO: 4876 - DNA, 15 bp, synthetic construct
  source 1..15: mol_type = other DNA
gtttcaaagggagac

SEQ ID NO: 4877 - DNA, 15 bp, synthetic construct
  source 1..15: mol_type = other DNA
gatacgctgtcatga

SEQ ID NO: 4878 - DNA, 15 bp, synthetic construct
  source 1..15: mol_type = other DNA
accataaggaatttg

SEQ ID NO: 4879 - DNA, 15 bp, synthetic construct
  source 1..15: mol_type = other DNA
tgtttaagtagggta

SEQ ID NO: 4880 - DNA, 15 bp, synthetic construct
  source 1..15: mol_type = other DNA
aggtatttcaaggtt

SEQ ID NO: 4881 - DNA, 15 bp, synthetic construct
  source 1..15: mol_type = other DNA
gagcaacattgttac

SEQ ID NO: 4882 - DNA, 15 bp, synthetic construct
  source 1..15: mol_type = other DNA
tatcatgcagaagca

SEQ ID NO: 4883 - DNA, 15 bp, synthetic construct
  source 1..15: mol_type = other DNA
cagtcagctaaacat

SEQ ID NO: 4884 - DNA, 15 bp, synthetic construct
  source 1..15: mol_type = other DNA
ccagtcctgaacttg

SEQ ID NO: 4885 - DNA, 15 bp, synthetic construct
  source 1..15: mol_type = other DNA
agtgcttttagtgca

SEQ ID NO: 4886 - DNA, 15 bp, synthetic construct
  source 1..15: mol_type = other DNA
agcatcaaaggtcca

SEQ ID NO: 4887 - DNA, 15 bp, synthetic construct
  source 1..15: mol_type = other DNA
tggtctatgatagca

SEQ ID NO: 4888 - DNA, 15 bp, synthetic construct
  source 1..15: mol_type = other DNA
aacaaggttgaccat

SEQ ID NO: 4889 - DNA, 15 bp, synthetic construct
  source 1..15: mol_type = other DNA
tctgtgtgcatactg

SEQ ID NO: 4890 - DNA, 15 bp, synthetic construct
  source 1..15: mol_type = other DNA
tgcttgagtgaagcc

SEQ ID NO: 4891 - DNA, 15 bp, synthetic construct
  source 1..15: mol_type = other DNA
ggaggtgtccttggg

SEQ ID NO: 4892 - DNA, 15 bp, synthetic construct
  source 1..15: mol_type = other DNA
tgtgaaatgtttctt

SEQ ID NO: 4893 - DNA, 15 bp, synthetic construct
  source 1..15: mol_type = other DNA
tcaaactaaagctct

SEQ ID NO: 4894 - DNA, 15 bp, synthetic construct
  source 1..15: mol_type = other DNA
ttcagctctacccat

SEQ ID NO: 4895 - DNA, 15 bp, synthetic construct
  source 1..15: mol_type = other DNA
gttccctacgatcac

SEQ ID NO: 4896 - DNA, 15 bp, synthetic construct
  source 1..15: mol_type = other DNA
caccatgttgatttg

SEQ ID NO: 4897 - DNA, 15 bp, synthetic construct
  source 1..15: mol_type = other DNA
gtacaatcctgtgga

SEQ ID NO: 4898 - DNA, 15 bp, synthetic construct
  source 1..15: mol_type = other DNA
tcctttgtaatccat

SEQ ID NO: 4899 - DNA, 15 bp, synthetic construct
  source 1..15: mol_type = other DNA
gtttctccttgcatt

SEQ ID NO: 4900 - DNA, 15 bp, synthetic construct
  source 1..15: mol_type = other DNA
agtccggtgacttag

SEQ ID NO: 4901 - DNA, 15 bp, synthetic construct
  source 1..15: mol_type = other DNA
acatttgtttttctt

SEQ ID NO: 4902 - DNA, 15 bp, synthetic construct
  source 1..15: mol_type = other DNA
gtgttttaggtgttt

SEQ ID NO: 4903 - DNA, 15 bp, synthetic construct
  source 1..15: mol_type = other DNA
ccgagtactttggaa

SEQ ID NO: 4904 - DNA, 15 bp, synthetic construct
  source 1..15: mol_type = other DNA
aagtcatagctgagg

SEQ ID NO: 4905 - DNA, 15 bp, synthetic construct
  source 1..15: mol_type = other DNA
acctaccaatatagt

SEQ ID NO: 4906 - DNA, 15 bp, synthetic construct
  source 1..15: mol_type = other DNA
tcttaagcttctgtt

SEQ ID NO: 4907 - DNA, 15 bp, synthetic construct
  source 1..15: mol_type = other DNA
ttcagaggtggtctg

SEQ ID NO: 4908 - DNA, 15 bp, synthetic construct
  source 1..15: mol_type = other DNA
atattggtgccattc

SEQ ID NO: 4909 - DNA, 15 bp, synthetic construct
  source 1..15: mol_type = other DNA
tctatgacaatgaag

SEQ ID NO: 4910 - DNA, 15 bp, synthetic construct
  source 1..15: mol_type = other DNA
taccttggtattcag

SEQ ID NO: 4911 - DNA, 15 bp, synthetic construct
  source 1..15: mol_type = other DNA
aatgccagaaacaga

SEQ ID NO: 4912 - DNA, 15 bp, synthetic construct
  source 1..15: mol_type = other DNA
aacttctgttccatc

SEQ ID NO: 4913 - DNA, 15 bp, synthetic construct
  source 1..15: mol_type = other DNA
gtgaatagacactac

SEQ ID NO: 4914 - DNA, 15 bp, synthetic construct
  source 1..15: mol_type = other DNA
ctcaaagctatagtt

SEQ ID NO: 4915 - DNA, 15 bp, synthetic construct
  source 1..15: mol_type = other DNA
aaatccaggtaaata

SEQ ID NO: 4916 - DNA, 15 bp, synthetic construct
  source 1..15: mol_type = other DNA
ccaaccgaacactgg

SEQ ID NO: 4917 - DNA, 15 bp, synthetic construct
  source 1..15: mol_type = other DNA
tttgtctgtcttctt

SEQ ID NO: 4918 - DNA, 15 bp, synthetic construct
  source 1..15: mol_type = other DNA
tgttttctcctccgt

SEQ ID NO: 4919 - DNA, 15 bp, synthetic construct
  source 1..15: mol_type = other DNA
gttccttgccaggta

SEQ ID NO: 4920 - DNA, 15 bp, synthetic construct
  source 1..15: mol_type = other DNA
taagtcaacggctct

SEQ ID NO: 4921 - DNA, 15 bp, synthetic construct
  source 1..15: mol_type = other DNA
caaacctggtgagtc

SEQ ID NO: 4922 - DNA, 15 bp, synthetic construct
  source 1..15: mol_type = other DNA
tatggtgtgtgaact

SEQ ID NO: 4923 - DNA, 15 bp, synthetic construct
  source 1..15: mol_type = other DNA
atgactttcttttta

SEQ ID NO: 4924 - DNA, 15 bp, synthetic construct
  source 1..15: mol_type = other DNA
gggttcctgtgatcc

SEQ ID NO: 4925 - DNA, 15 bp, synthetic construct
  source 1..15: mol_type = other DNA
aaaataaagaggcag

SEQ ID NO: 4926 - DNA, 15 bp, synthetic construct
  source 1..15: mol_type = other DNA
taagtaccaccgaga

SEQ ID NO: 4927 - DNA, 15 bp, synthetic construct
  source 1..15: mol_type = other DNA
aaagtgtagtttgca

SEQ ID NO: 4928 - DNA, 15 bp, synthetic construct
  source 1..15: mol_type = other DNA
tatttcgtggtttct

SEQ ID NO: 4929 - DNA, 15 bp, synthetic construct
  source 1..15: mol_type = other DNA
ctttgtgataaagat

SEQ ID NO: 4930 - DNA, 15 bp, synthetic construct
  source 1..15: mol_type = other DNA
acatgaagctaaggt

SEQ ID NO: 4931 - DNA, 15 bp, synthetic construct
  source 1..15: mol_type = other DNA
atcttgttgctttat

SEQ ID NO: 4932 - DNA, 15 bp, synthetic construct
  source 1..15: mol_type = other DNA
ttctgtatttaccat

SEQ ID NO: 4933 - DNA, 15 bp, synthetic construct
  source 1..15: mol_type = other DNA
agcatgtaccaatct

SEQ ID NO: 4934 - DNA, 15 bp, synthetic construct
  source 1..15: mol_type = other DNA
ctctgcgtagtaagg

SEQ ID NO: 4935 - DNA, 15 bp, synthetic construct
  source 1..15: mol_type = other DNA
caagctttcaggttc

SEQ ID NO: 4936 - DNA, 15 bp, synthetic construct
  source 1..15: mol_type = other DNA
cacggtggtgacttg

SEQ ID NO: 4937 - DNA, 15 bp, synthetic construct
  source 1..15: mol_type = other DNA
gacaaactgagctgg

SEQ ID NO: 4938 - DNA, 15 bp, synthetic construct
  source 1..15: mol_type = other DNA
gcagactaggattgc

SEQ ID NO: 4939 - DNA, 15 bp, synthetic construct
  source 1..15: mol_type = other DNA
cggattgacgtcatt

SEQ ID NO: 4940 - DNA, 15 bp, synthetic construct
  source 1..15: mol_type = other DNA
gcccgataatggaac

SEQ ID NO: 4941 - DNA, 15 bp, synthetic construct
  source 1..15: mol_type = other DNA
taggaaagtccatca

SEQ ID NO: 4942 - DNA, 15 bp, synthetic construct
  source 1..15: mol_type = other DNA
cttggctttcttagg

SEQ ID NO: 4943 - DNA, 15 bp, synthetic construct
  source 1..15: mol_type = other DNA
ttatagctacacctt

SEQ ID NO: 4944 - DNA, 15 bp, synthetic construct
  source 1..15: mol_type = other DNA
tgtctgacccatctt

SEQ ID NO: 4945 - DNA, 15 bp, synthetic construct
  source 1..15: mol_type = other DNA
tcgaatgtgctttaa

SEQ ID NO: 4946 - DNA, 15 bp, synthetic construct
  source 1..15: mol_type = other DNA
tcatgacagaaaaca

SEQ ID NO: 4947 - DNA, 15 bp, synthetic construct
  source 1..15: mol_type = other DNA
agtctctgtttcagg

SEQ ID NO: 4948 - DNA, 15 bp, synthetic construct
  source 1..15: mol_type = other DNA
ttggtctacctttct

SEQ ID NO: 4949 - DNA, 15 bp, synthetic construct
  source 1..15: mol_type = other DNA
ggttcagaacttcag

SEQ ID NO: 4950 - DNA, 15 bp, synthetic construct
  source 1..15: mol_type = other DNA
tacagtcctaagctc

SEQ ID NO: 4951 - DNA, 15 bp, synthetic construct
  source 1..15: mol_type = other DNA
gttaagtgcttgcta

SEQ ID NO: 4952 - DNA, 15 bp, synthetic construct
  source 1..15: mol_type = other DNA
ttgtcggataaagtc

SEQ ID NO: 4953 - DNA, 15 bp, synthetic construct
  source 1..15: mol_type = other DNA
agaagagatatggga

SEQ ID NO: 4954 - DNA, 15 bp, synthetic construct
  source 1..15: mol_type = other DNA
ggttatgcctcctca

SEQ ID NO: 4955 - DNA, 15 bp, synthetic construct
  source 1..15: mol_type = other DNA
cttcacacttctgtc

SEQ ID NO: 4956 - DNA, 15 bp, synthetic construct
  source 1..15: mol_type = other DNA
tggaaatttacagat

SEQ ID NO: 4957 - DNA, 15 bp, synthetic construct
  source 1..15: mol_type = other DNA
tcactgataacatgt

SEQ ID NO: 4958 - DNA, 15 bp, synthetic construct
  source 1..15: mol_type = other DNA
aattagtatcaggct

SEQ ID NO: 4959 - DNA, 15 bp, synthetic construct
  source 1..15: mol_type = other DNA
actggcaaatttgat

SEQ ID NO: 4960 - DNA, 15 bp, synthetic construct
  source 1..15: mol_type = other DNA
agagatgagtagatt

SEQ ID NO: 4961 - DNA, 15 bp, synthetic construct
  source 1..15: mol_type = other DNA
aatgctcaagatgtt

SEQ ID NO: 4962 - DNA, 15 bp, synthetic construct
  source 1..15: mol_type = other DNA
tagttctgcatcttt

SEQ ID NO: 4963 - DNA, 15 bp, synthetic construct
  source 1..15: mol_type = other DNA
atgattgcctctttc

SEQ ID NO: 4964 - DNA, 15 bp, synthetic construct
  source 1..15: mol_type = other DNA
tgtgaacactgttct

SEQ ID NO: 4965 - DNA, 15 bp, synthetic construct
  source 1..15: mol_type = other DNA
atcaggcagcaaaac

SEQ ID NO: 4966 - DNA, 15 bp, synthetic construct
  source 1..15: mol_type = other DNA
ccgttccattctgta

SEQ ID NO: 4967 - DNA, 15 bp, synthetic construct
  source 1..15: mol_type = other DNA
tcactgaaggtatct

SEQ ID NO: 4968 - DNA, 15 bp, synthetic construct
  source 1..15: mol_type = other DNA
cttgtcatcaaggtt

SEQ ID NO: 4969 - DNA, 15 bp, synthetic construct
  source 1..15: mol_type = other DNA
ctgtccacctatgat

SEQ ID NO: 4970 - DNA, 15 bp, synthetic construct
  source 1..15: mol_type = other DNA
ttttgctttcatagt

SEQ ID NO: 4971 - DNA, 15 bp, synthetic construct
  source 1..15: mol_type = other DNA
accctgttttggatg

SEQ ID NO: 4972 - DNA, 15 bp, synthetic construct
  source 1..15: mol_type = other DNA
gacctccagattttc

SEQ ID NO: 4973 - DNA, 15 bp, synthetic construct
  source 1..15: mol_type = other DNA
ttattccaatttcct

SEQ ID NO: 4974 - DNA, 15 bp, synthetic construct
  source 1..15: mol_type = other DNA
gcatttttatttcta

SEQ ID NO: 4975 - DNA, 15 bp, synthetic construct
  source 1..15: mol_type = other DNA
ctggatcaggagagg

SEQ ID NO: 4976 - DNA, 15 bp, synthetic construct
  source 1..15: mol_type = other DNA
tcatatcccaccaga

SEQ ID NO: 4977 - DNA, 15 bp, synthetic construct
  source 1..15: mol_type = other DNA
acatctatgtccttc

SEQ ID NO: 4978 - DNA, 15 bp, synthetic construct
  source 1..15: mol_type = other DNA
tggaacatacacagc

SEQ ID NO: 4979 - DNA, 15 bp, synthetic construct
  source 1..15: mol_type = other DNA
ccagactctttaggg

SEQ ID NO: 4980 - DNA, 15 bp, synthetic construct
  source 1..15: mol_type = other DNA
ttctactcaccttcc

SEQ ID NO: 4981 - DNA, 15 bp, synthetic construct
  source 1..15: mol_type = other DNA
aaaataatgaatctg

SEQ ID NO: 4982 - DNA, 15 bp, synthetic construct
  source 1..15: mol_type = other DNA
gagtatactactaag

SEQ ID NO: 4983 - DNA, 15 bp, synthetic construct
  source 1..15: mol_type = other DNA
atctgtgagggagta

SEQ ID NO: 4984 - DNA, 15 bp, synthetic construct
  source 1..15: mol_type = other DNA
atcaattgcttccag

SEQ ID NO: 4985 - DNA, 15 bp, synthetic construct
  source 1..15: mol_type = other DNA
ctggaagcaattgat

SEQ ID NO: 4986 - DNA, 15 bp, synthetic construct
  source 1..15: mol_type = other DNA
tagccagcataactc

SEQ ID NO: 4987 - DNA, 15 bp, synthetic construct
  source 1..15: mol_type = other DNA
tctatcggttcctgg

SEQ ID NO: 4988 - DNA, 15 bp, synthetic construct
  source 1..15: mol_type = other DNA
tcttgtctgtctttg

SEQ ID NO: 4989 - DNA, 15 bp, synthetic construct
  source 1..15: mol_type = other DNA
agtggagatgacacc

SEQ ID NO: 4990 - DNA, 15 bp, synthetic construct
  source 1..15: mol_type = other DNA
actctcactctcttg

SEQ ID NO: 4991 - DNA, 15 bp, synthetic construct
  source 1..15: mol_type = other DNA
aacttgacaatgagg

SEQ ID NO: 4992 - DNA, 15 bp, synthetic construct
  source 1..15: mol_type = other DNA
gtttgcttgctcact

SEQ ID NO: 4993 - DNA, 15 bp, synthetic construct
  source 1..15: mol_type = other DNA
acgatgagggaatgc

SEQ ID NO: 4994 - DNA, 15 bp, synthetic construct
  source 1..15: mol_type = other DNA
gtagagtcactcttg

SEQ ID NO: 4995 - DNA, 15 bp, synthetic construct
  source 1..15: mol_type = other DNA
gtctcgcatctcaga

SEQ ID NO: 4996 - DNA, 15 bp, synthetic construct
  source 1..15: mol_type = other DNA
ctgttctcttgagat

SEQ ID NO: 4997 - DNA, 15 bp, synthetic construct
  source 1..15: mol_type = other DNA
aaaacgtagatggtc

SEQ ID NO: 4998 - DNA, 15 bp, synthetic construct
  source 1..15: mol_type = other DNA
tctgagaagttgagg

SEQ ID NO: 4999 - DNA, 15 bp, synthetic construct
  source 1..15: mol_type = other DNA
ctcaaaaagtgaatc

SEQ ID NO: 5000 - DNA, 15 bp, synthetic construct
  source 1..15: mol_type = other DNA
actgcttgatttgct

SEQ ID NO: 5001 - DNA, 15 bp, synthetic construct
  source 1..15: mol_type = other DNA
cgacagtgactctca

SEQ ID NO: 5002 - DNA, 15 bp, synthetic construct
  source 1..15: mol_type = other DNA
ctgcttcttaggaca

SEQ ID NO: 5003 - DNA, 15 bp, synthetic construct
  source 1..15: mol_type = other DNA
gaacatggctcctga

SEQ ID NO: 5004 - DNA, 15 bp, synthetic construct
  source 1..15: mol_type = other DNA
ggatgcgctgcatct

SEQ ID NO: 5005 - DNA, 15 bp, synthetic construct
  source 1..15: mol_type = other DNA
tccagtcgcgtgcag

SEQ ID NO: 5006 - DNA, 15 bp, synthetic construct
  source 1..15: mol_type = other DNA
gttatcgcggctcca

SEQ ID NO: 5007 - DNA, 15 bp, synthetic construct
  source 1..15: mol_type = other DNA
ctcctccgctctcgt

SEQ ID NO: 5008 - DNA, 15 bp, synthetic construct
  source 1..15: mol_type = other DNA
gccctggtcctctcg

SEQ ID NO: 5009 - DNA, 15 bp, synthetic construct
  source 1..15: mol_type = other DNA
ctcggccgtgagctc

SEQ ID NO: 5010 - DNA, 15 bp, synthetic construct
  source 1..15: mol_type = other DNA
ccggccgttctggtt

SEQ ID NO: 5011 - DNA, 15 bp, synthetic construct
  source 1..15: mol_type = other DNA
tataggtgaactttt

SEQ ID NO: 5012 - DNA, 15 bp, synthetic construct
  source 1..15: mol_type = other DNA
tcccattagtgcaag

SEQ ID NO: 5013 - DNA, 15 bp, synthetic construct
  source 1..15: mol_type = other DNA
tataggtgaactttt

SEQ ID NO: 5014 - DNA, 15 bp, synthetic construct
  source 1..15: mol_type = other DNA
tcccattagtgcaag

SEQ ID NO: 5015 - DNA, 15 bp, synthetic construct
  source 1..15: mol_type = other DNA
tgtgtgccggttccc

SEQ ID NO: 5016 - DNA, 15 bp, synthetic construct
  source 1..15: mol_type = other DNA
tttctgtgatagaga

SEQ ID NO: 5017 - DNA, 15 bp, synthetic construct
  source 1..15: mol_type = other DNA
acaacaaaactcatt

SEQ ID NO: 5018 - DNA, 15 bp, synthetic construct
  source 1..15: mol_type = other DNA
cgtattcgtggaacc

SEQ ID NO: 5019 - DNA, 15 bp, synthetic construct
  source 1..15: mol_type = other DNA
ctgtactggaagatg

SEQ ID NO: 5020 - DNA, 15 bp, synthetic construct
  source 1..15: mol_type = other DNA
accgagtggcaatga

SEQ ID NO: 5021 - DNA, 15 bp, synthetic construct
  source 1..15: mol_type = other DNA
cactgattgtaactg

SEQ ID NO: 5022 - DNA, 15 bp, synthetic construct
  source 1..15: mol_type = other DNA
caggttaatgttggc

SEQ ID NO: 5023 - DNA, 15 bp, synthetic construct
  source 1..15: mol_type = other DNA
ggtagtagccactgg

SEQ ID NO: 5024 - DNA, 15 bp, synthetic construct
  source 1..15: mol_type = other DNA
gaataggatgtatgt

SEQ ID NO: 5025 - DNA, 15 bp, synthetic construct
  source 1..15: mol_type = other DNA
tggacatccattcct

SEQ ID NO: 5026 - DNA, 15 bp, synthetic construct
  source 1..15: mol_type = other DNA
tagtttgtgaatgcg

SEQ ID NO: 5027 - DNA, 15 bp, synthetic construct
  source 1..15: mol_type = other DNA
ctgatccgatatgtc

SEQ ID NO: 5028 - DNA, 15 bp, synthetic construct
  source 1..15: mol_type = other DNA
aagatccacaatgct

SEQ ID NO: 5029 - DNA, 15 bp, synthetic construct
  source 1..15: mol_type = other DNA
gtataatggtgagcc

SEQ ID NO: 5030 - DNA, 15 bp, synthetic construct
  source 1..15: mol_type = other DNA
ctatattgttgaact

SEQ ID NO: 5031 - DNA, 15 bp, synthetic construct
  source 1..15: mol_type = other DNA
tggaggtgctactac

SEQ ID NO: 5032 - DNA, 15 bp, synthetic construct
  source 1..15: mol_type = other DNA
cacttgaatttcaaa

SEQ ID NO: 5033 - DNA, 15 bp, synthetic construct
  source 1..15: mol_type = other DNA
atgtcttctctctct

SEQ ID NO: 5034 - DNA, 15 bp, synthetic construct
  source 1..15: mol_type = other DNA
tgacaactctgatta

SEQ ID NO: 5035 - DNA, 15 bp, synthetic construct
  source 1..15: mol_type = other DNA
tcaactagtggacat

SEQ ID NO: 5036 - DNA, 15 bp, synthetic construct
  source 1..15: mol_type = other DNA
gagaaaagagaagac

SEQ ID NO: 5037 - DNA, 15 bp, synthetic construct
  source 1..15: mol_type = other DNA
atttttgccctcctt

SEQ ID NO: 5038 - DNA, 15 bp, synthetic construct
  source 1..15: mol_type = other DNA
tttgaaaatctgggt

SEQ ID NO: 5039 - DNA, 15 bp, synthetic construct
  source 1..15: mol_type = other DNA
agaatacactaaacc

SEQ ID NO: 5040 - DNA, 15 bp, synthetic construct
  source 1..15: mol_type = other DNA
ttgggctagaaatac

SEQ ID NO: 5041 - DNA, 15 bp, synthetic construct
  source 1..15: mol_type = other DNA
tacaaggaatgattt

SEQ ID NO: 5042 - DNA, 15 bp, synthetic construct
  source 1..15: mol_type = other DNA
aagagactcaataac

SEQ ID NO: 5043 - DNA, 15 bp, synthetic construct
  source 1..15: mol_type = other DNA
ccaggtaaatggcat

SEQ ID NO: 5044 - DNA, 15 bp, synthetic construct
  source 1..15: mol_type = other DNA
gtaagaaacgccact

SEQ ID NO: 5045 - DNA, 15 bp, synthetic construct
  source 1..15: mol_type = other DNA
ggatcacagttcttt

SEQ ID NO: 5046 - DNA, 15 bp, synthetic construct
  source 1..15: mol_type = other DNA
tagtaatggaaagga

SEQ ID NO: 5047 - DNA, 15 bp, synthetic construct
  source 1..15: mol_type = other DNA
atgacaagcactttg

SEQ ID NO: 5048 - DNA, 15 bp, synthetic construct
  source 1..15: mol_type = other DNA
caccatgctcagcag

SEQ ID NO: 5049 - DNA, 15 bp, synthetic construct
  source 1..15: mol_type = other DNA
ctggacttcctaagg

SEQ ID NO: 5050 - DNA, 15 bp, synthetic construct
  source 1..15: mol_type = other DNA
gccttctgtagattg

SEQ ID NO: 5051 - DNA, 15 bp, synthetic construct
  source 1..15: mol_type = other DNA
gtgaaatccataggg

SEQ ID NO: 5052 - DNA, 15 bp, synthetic construct
  source 1..15: mol_type = other DNA
ttcctcacttattag

SEQ ID NO: 5053 - DNA, 15 bp, synthetic construct
  source 1..15: mol_type = other DNA
tgctgctgtgcaaca

SEQ ID NO: 5054 - DNA, 15 bp, synthetic construct
  source 1..15: mol_type = other DNA
aatatttggtaaagc

SEQ ID NO: 5055 - DNA, 15 bp, synthetic construct
  source 1..15: mol_type = other DNA
catacaagccaaggc

SEQ ID NO: 5056 - DNA, 15 bp, synthetic construct
  source 1..15: mol_type = other DNA
attgtaaacacacaa

SEQ ID NO: 5057 - DNA, 15 bp, synthetic construct
  source 1..15: mol_type = other DNA
gtagtaacaaaaccc

SEQ ID NO: 5058 - DNA, 15 bp, synthetic construct
  source 1..15: mol_type = other DNA
agactgtgaatatgt

SEQ ID NO: 5059 - DNA, 15 bp, synthetic construct
  source 1..15: mol_type = other DNA
ttgggaatgcagtca

SEQ ID NO: 5060 - DNA, 15 bp, synthetic construct
  source 1..15: mol_type = other DNA
ttcaagaaagagttg

SEQ ID NO: 5061 - DNA, 15 bp, synthetic construct
  source 1..15: mol_type = other DNA
tgtgcaggaagaaat

SEQ ID NO: 5062 - DNA, 15 bp, synthetic construct
  source 1..15: mol_type = other DNA
agttgggttaactac

SEQ ID NO: 5063 - DNA, 15 bp, synthetic construct
  source 1..15: mol_type = other DNA
atatgcttgcaaggt

SEQ ID NO: 5064 - DNA, 15 bp, synthetic construct
  source 1..15: mol_type = other DNA
gcttcttaaactaat

SEQ ID NO: 5065 - DNA, 15 bp, synthetic construct
  source 1..15: mol_type = other DNA
taatcctccggatcc

SEQ ID NO: 5066 - DNA, 15 bp, synthetic construct
  source 1..15: mol_type = other DNA
tctgtctaagaatgc

SEQ ID NO: 5067 - DNA, 15 bp, synthetic construct
  source 1..15: mol_type = other DNA
actcatcctaccctc

SEQ ID NO: 5068 - DNA, 15 bp, synthetic construct
  source 1..15: mol_type = other DNA
cattgtcacagtcgt

SEQ ID NO: 5069 - DNA, 15 bp, synthetic construct
  source 1..15: mol_type = other DNA
cttacctgttctgga

SEQ ID NO: 5070 - DNA, 15 bp, synthetic construct
  source 1..15: mol_type = other DNA
tctcccagggacgtt

SEQ ID NO: 5071 - DNA, 15 bp, synthetic construct
  source 1..15: mol_type = other DNA
catttgagtatttca

SEQ ID NO: 5072 - DNA, 15 bp, synthetic construct
  source 1..15: mol_type = other DNA
aagccactcatagaa

SEQ ID NO: 5073 - DNA, 15 bp, synthetic construct
  source 1..15: mol_type = other DNA
cttcttcttctcacc

SEQ ID NO: 5074 - DNA, 15 bp, synthetic construct
  source 1..15: mol_type = other DNA
gaaggtgttagggaa

SEQ ID NO: 5075 - DNA, 15 bp, synthetic construct
  source 1..15: mol_type = other DNA
cacaaagccacattt

SEQ ID NO: 5076 - DNA, 15 bp, synthetic construct
  source 1..15: mol_type = other DNA
gttctctttgttttc

SEQ ID NO: 5077 - DNA, 15 bp, synthetic construct
  source 1..15: mol_type = other DNA
atggaacaaacacat

SEQ ID NO: 5078 - DNA, 15 bp, synthetic construct
  source 1..15: mol_type = other DNA
cagcctcgatattcc

SEQ ID NO: 5079 - DNA, 15 bp, synthetic construct
  source 1..15: mol_type = other DNA
aagtatcccaaggcc

SEQ ID NO: 5080 - DNA, 15 bp, synthetic construct
  source 1..15: mol_type = other DNA
aaagtcaggctgaac

SEQ ID NO: 5081 - DNA, 15 bp, synthetic construct
  source 1..15: mol_type = other DNA
tacctgctttgtttt

SEQ ID NO: 5082 - DNA, 15 bp, synthetic construct
  source 1..15: mol_type = other DNA
tgatccttccatctt

SEQ ID NO: 5083 - DNA, 15 bp, synthetic construct
  source 1..15: mol_type = other DNA
atttaccttttcagg

SEQ ID NO: 5084 - DNA, 15 bp, synthetic construct
  source 1..15: mol_type = other DNA
ctcttacaggactgg

SEQ ID NO: 5085 - DNA, 15 bp, synthetic construct
  source 1..15: mol_type = other DNA
agtcctacttatgct

SEQ ID NO: 5086 - DNA, 15 bp, synthetic construct
  source 1..15: mol_type = other DNA
atgatgttgtgatgg

SEQ ID NO: 5087 - DNA, 15 bp, synthetic construct
  source 1..15: mol_type = other DNA
agtcctacttatgct

SEQ ID NO: 5088 - DNA, 15 bp, synthetic construct
  source 1..15: mol_type = other DNA
atgatgttgtgatgg

SEQ ID NO: 5089 - DNA, 15 bp, synthetic construct
  source 1..15: mol_type = other DNA
accttggagtctgcc

SEQ ID NO: 5090 - DNA, 15 bp, synthetic construct
  source 1..15: mol_type = other DNA
cttagaaaagactca

SEQ ID NO: 5091 - DNA, 15 bp, synthetic construct
  source 1..15: mol_type = other DNA
accttggagtctgcc

SEQ ID NO: 5092 - DNA, 15 bp, synthetic construct
  source 1..15: mol_type = other DNA
cttagaaaagactca

SEQ ID NO: 5093 - DNA, 15 bp, synthetic construct
  source 1..15: mol_type = other DNA
gcacttacccatata

SEQ ID NO: 5094 - DNA, 15 bp, synthetic construct
  source 1..15: mol_type = other DNA
tgtgttggagggaaa

SEQ ID NO: 5095 - DNA, 15 bp, synthetic construct
  source 1..15: mol_type = other DNA
tccacagcacctaga

SEQ ID NO: 5096 - DNA, 15 bp, synthetic construct
  source 1..15: mol_type = other DNA
taatagaacctgact

SEQ ID NO: 5097 - DNA, 15 bp, synthetic construct
  source 1..15: mol_type = other DNA
aagcatgtgtctgta

SEQ ID NO: 5098 - DNA, 15 bp, synthetic construct
  source 1..15: mol_type = other DNA
tgtgttaagttttca

SEQ ID NO: 5099 - DNA, 15 bp, synthetic construct
  source 1..15: mol_type = other DNA
tggttttcgacaagg

SEQ ID NO: 5100 - DNA, 15 bp, synthetic construct
  source 1..15: mol_type = other DNA
agtgtttgcaatctc

SEQ ID NO: 5101 - DNA, 15 bp, synthetic construct
  source 1..15: mol_type = other DNA
cataaactctgtgga

SEQ ID NO: 5102 - DNA, 15 bp, synthetic construct
  source 1..15: mol_type = other DNA
aagtggccaattatt

SEQ ID NO: 5103 - DNA, 15 bp, synthetic construct
  source 1..15: mol_type = other DNA
aaaggccttcctaca

SEQ ID NO: 5104 - DNA, 15 bp, synthetic construct
  source 1..15: mol_type = other DNA
aaggaaatgtgtgat

SEQ ID NO: 5105 - DNA, 15 bp, synthetic construct
  source 1..15: mol_type = other DNA
ttggataaaccactt

SEQ ID NO: 5106 - DNA, 15 bp, synthetic construct
  source 1..15: mol_type = other DNA
cataatcccaatggt

SEQ ID NO: 5107 - DNA, 15 bp, synthetic construct
  source 1..15: mol_type = other DNA
gctaggaaattagct

SEQ ID NO: 5108 - DNA, 15 bp, synthetic construct
  source 1..15: mol_type = other DNA
tacaatgcaggcact

SEQ ID NO: 5109 - DNA, 15 bp, synthetic construct
  source 1..15: mol_type = other DNA
cgatgtcattttggt

SEQ ID NO: 5110 - DNA, 15 bp, synthetic construct
  source 1..15: mol_type = other DNA
tttttaaaagggaaa

SEQ ID NO: 5111 - DNA, 15 bp, synthetic construct
  source 1..15: mol_type = other DNA
atcatctgccacaat

SEQ ID NO: 5112 - DNA, 15 bp, synthetic construct
  source 1..15: mol_type = other DNA
ccatggaaatatctt

SEQ ID NO: 5113 - DNA, 15 bp, synthetic construct
  source 1..15: mol_type = other DNA
cctcctgcccctttc

SEQ ID NO: 5114 - DNA, 15 bp, synthetic construct
  source 1..15: mol_type = other DNA
aatcaagaagtgtgt

SEQ ID NO: 5115 - DNA, 15 bp, synthetic construct
  source 1..15: mol_type = other DNA
gaaattacagcctaa

SEQ ID NO: 5116 - DNA, 15 bp, synthetic construct
  source 1..15: mol_type = other DNA
atgacatgccttggg

SEQ ID NO: 5117 - DNA, 15 bp, synthetic construct
  source 1..15: mol_type = other DNA
cgcctaaactaatgt

SEQ ID NO: 5118 - DNA, 15 bp, synthetic construct
  source 1..15: mol_type = other DNA
tgatatatgtatagt

SEQ ID NO: 5119 - DNA, 15 bp, synthetic construct
  source 1..15: mol_type = other DNA
ctcagtgttcttact

SEQ ID NO: 5120 - DNA, 15 bp, synthetic construct
  source 1..15: mol_type = other DNA
cctgcttatgtttgc

SEQ ID NO: 5121 - DNA, 15 bp, synthetic construct
  source 1..15: mol_type = other DNA
actggcttggaatgc

SEQ ID NO: 5122 - DNA, 15 bp, synthetic construct
  source 1..15: mol_type = other DNA
tgtgatggtatcaat

SEQ ID NO: 5123 - DNA, 15 bp, synthetic construct
  source 1..15: mol_type = other DNA
actggcttggaatgc

SEQ ID NO: 5124 - DNA, 15 bp, synthetic construct
  source 1..15: mol_type = other DNA
tgtgatggtatcaat

SEQ ID NO: 5125 - DNA, 15 bp, synthetic construct
  source 1..15: mol_type = other DNA
aacacagttcatcac

SEQ ID NO: 5126 - DNA, 15 bp, synthetic construct
  source 1..15: mol_type = other DNA
ataaggatgtcatgc

SEQ ID NO: 5127 - DNA, 15 bp, synthetic construct
  source 1..15: mol_type = other DNA
atcatttgtttacta

SEQ ID NO: 5128 - DNA, 15 bp, synthetic construct
  source 1..15: mol_type = other DNA
ggtgctgatactcaa

SEQ ID NO: 5129 - DNA, 15 bp, synthetic construct
  source 1..15: mol_type = other DNA
caaatactccaccaa

SEQ ID NO: 5130 - DNA, 15 bp, synthetic construct
  source 1..15: mol_type = other DNA
gttataaatgcaaag

SEQ ID NO: 5131 - DNA, 15 bp, synthetic construct
  source 1..15: mol_type = other DNA
ttaaatcagccatga

SEQ ID NO: 5132 - DNA, 15 bp, synthetic construct
  source 1..15: mol_type = other DNA
attgcacattatttt

SEQ ID NO: 5133 - DNA, 15 bp, synthetic construct
  source 1..15: mol_type = other DNA
catacaaataccctt

SEQ ID NO: 5134 - DNA, 15 bp, synthetic construct
  source 1..15: mol_type = other DNA
gtgtttgtaaactac

SEQ ID NO: 5135 - DNA, 15 bp, synthetic construct
  source 1..15: mol_type = other DNA
gttgacagtatgttg

SEQ ID NO: 5136 - DNA, 15 bp, synthetic construct
  source 1..15: mol_type = other DNA
ctttaatttgttgct

SEQ ID NO: 5137 - DNA, 15 bp, synthetic construct
  source 1..15: mol_type = other DNA
tgactatagagtggc

SEQ ID NO: 5138 - DNA, 15 bp, synthetic construct
  source 1..15: mol_type = other DNA
ctggagtggaaaaga

SEQ ID NO: 5139 - DNA, 15 bp, synthetic construct
  source 1..15: mol_type = other DNA
caagctgttttcttt

SEQ ID NO: 5140 - DNA, 15 bp, synthetic construct
  source 1..15: mol_type = other DNA
ataccagattgaacc

SEQ ID NO: 5141 - DNA, 15 bp, synthetic construct
  source 1..15: mol_type = other DNA
gtctctttcttccca

SEQ ID NO: 5142 - DNA, 15 bp, synthetic construct
  source 1..15: mol_type = other DNA
ctcaaacactgtagg

SEQ ID NO: 5143 - DNA, 15 bp, synthetic construct
  source 1..15: mol_type = other DNA
gcaccgtatctgtga

SEQ ID NO: 5144 - DNA, 15 bp, synthetic construct
  source 1..15: mol_type = other DNA
tgattccttcctgtt

SEQ ID NO: 5145 - DNA, 15 bp, synthetic construct
  source 1..15: mol_type = other DNA
tggaatggcaataaa

SEQ ID NO: 5146 - DNA, 15 bp, synthetic construct
  source 1..15: mol_type = other DNA
gaggatccctttgaa

SEQ ID NO: 5147 - DNA, 15 bp, synthetic construct
  source 1..15: mol_type = other DNA
tcatttttgggtcta

SEQ ID NO: 5148 - DNA, 15 bp, synthetic construct
  source 1..15: mol_type = other DNA
actaatgtggacaga

SEQ ID NO: 5149 - DNA, 15 bp, synthetic construct
  source 1..15: mol_type = other DNA
ctgtgtcattggatg

SEQ ID NO: 5150 - DNA, 15 bp, synthetic construct
  source 1..15: mol_type = other DNA
ttttggattcaaaat

SEQ ID NO: 5151 - DNA, 15 bp, synthetic construct
  source 1..15: mol_type = other DNA
aaaacgtaggtggtt

SEQ ID NO: 5152 - DNA, 15 bp, synthetic construct
  source 1..15: mol_type = other DNA
tcaccaagtggtaca

SEQ ID NO: 5153 - DNA, 15 bp, synthetic construct
  source 1..15: mol_type = other DNA
ggcataatttgtttg

SEQ ID NO: 5154 - DNA, 15 bp, synthetic construct
  source 1..15: mol_type = other DNA
tgggaactatgtgtc

SEQ ID NO: 5155 - DNA, 15 bp, synthetic construct
  source 1..15: mol_type = other DNA
tttagcagtgtcctc

SEQ ID NO: 5156 - DNA, 15 bp, synthetic construct
  source 1..15: mol_type = other DNA
cattaccttcacagt

SEQ ID NO: 5157 - DNA, 15 bp, synthetic construct
  source 1..15: mol_type = other DNA
atgtattgtgctgtt

SEQ ID NO: 5158 - DNA, 15 bp, synthetic construct
  source 1..15: mol_type = other DNA
actgctgattgaaga

SEQ ID NO: 5159 - DNA, 15 bp, synthetic construct
  source 1..15: mol_type = other DNA
ggcaatattagcaac

SEQ ID NO: 5160 - DNA, 15 bp, synthetic construct
  source 1..15: mol_type = other DNA
atgtatgttttcaaa

SEQ ID NO: 5161 - DNA, 15 bp, synthetic construct
  source 1..15: mol_type = other DNA
ttgatgaaaaataat

SEQ ID NO: 5162 - DNA, 15 bp, synthetic construct
  source 1..15: mol_type = other DNA
ttgtaggtcataccc

SEQ ID NO: 5163 - DNA, 15 bp, synthetic construct
  source 1..15: mol_type = other DNA
tgtaggttgttcctc

SEQ ID NO: 5164 - DNA, 15 bp, synthetic construct
  source 1..15: mol_type = other DNA
agttaactttccatc

SEQ ID NO: 5165 - DNA, 15 bp, synthetic construct
  source 1..15: mol_type = other DNA
tgaaagggaagagtc

SEQ ID NO: 5166 - DNA, 15 bp, synthetic construct
  source 1..15: mol_type = other DNA
aagcatgtccacatc

SEQ ID NO: 5167 - DNA, 15 bp, synthetic construct
  source 1..15: mol_type = other DNA
ctagtgccatttgta

SEQ ID NO: 5168 - DNA, 15 bp, synthetic construct
  source 1..15: mol_type = other DNA
cttaaaactgaagca

SEQ ID NO: 5169 - DNA, 15 bp, synthetic construct
  source 1..15: mol_type = other DNA
atgcctatctttgca

SEQ ID NO: 5170 - DNA, 15 bp, synthetic construct
  source 1..15: mol_type = other DNA
aactgtcacatgacc

SEQ ID NO: 5171 - DNA, 15 bp, synthetic construct
  source 1..15: mol_type = other DNA
ttgtgtgctttcttg

SEQ ID NO: 5172 - DNA, 15 bp, synthetic construct
  source 1..15: mol_type = other DNA
tcacctacatcattc

SEQ ID NO: 5173 - DNA, 15 bp, synthetic construct
  source 1..15: mol_type = other DNA
gctctgatctaatct

SEQ ID NO: 5174 - DNA, 15 bp, synthetic construct
  source 1..15: mol_type = other DNA
tattcacccatacgg

SEQ ID NO: 5175 - DNA, 15 bp, synthetic construct
  source 1..15: mol_type = other DNA
agacaaagaaggtgt

SEQ ID NO: 5176 - DNA, 15 bp, synthetic construct
  source 1..15: mol_type = other DNA
agactgtgtaacatc

SEQ ID NO: 5177 - DNA, 15 bp, synthetic construct
  source 1..15: mol_type = other DNA
catccttttcatctt

SEQ ID NO: 5178 - DNA, 15 bp, synthetic construct
  source 1..15: mol_type = other DNA
tatttctgagccaac

SEQ ID NO: 5179 - DNA, 15 bp, synthetic construct
  source 1..15: mol_type = other DNA
tctgaactcacaacc

SEQ ID NO: 5180 - DNA, 15 bp, synthetic construct
  source 1..15: mol_type = other DNA
gtatattggagaact

SEQ ID NO: 5181 - DNA, 15 bp, synthetic construct
  source 1..15: mol_type = other DNA
gaggttaacctgtcc

SEQ ID NO: 5182 - DNA, 15 bp, synthetic construct
  source 1..15: mol_type = other DNA
ttttctcttaccaga

SEQ ID NO: 5183 - DNA, 15 bp, synthetic construct
  source 1..15: mol_type = other DNA
caagatgactgtgct

SEQ ID NO: 5184 - DNA, 15 bp, synthetic construct
  source 1..15: mol_type = other DNA
taaatccttctggag

SEQ ID NO: 5185 - DNA, 15 bp, synthetic construct
  source 1..15: mol_type = other DNA
caactagtcccattt

SEQ ID NO: 5186 - DNA, 15 bp, synthetic construct
  source 1..15: mol_type = other DNA
ttgtttcccgatttc

SEQ ID NO: 5187 - DNA, 15 bp, synthetic construct
  source 1..15: mol_type = other DNA
gctgtccaactataa

SEQ ID NO: 5188 - DNA, 15 bp, synthetic construct
  source 1..15: mol_type = other DNA
atatccccgagccaa

SEQ ID NO: 5189 - DNA, 15 bp, synthetic construct
  source 1..15: mol_type = other DNA
acttgaaagacacta

SEQ ID NO: 5190 - DNA, 15 bp, synthetic construct
  source 1..15: mol_type = other DNA
aatagcatctctctg

SEQ ID NO: 5191 - DNA, 15 bp, synthetic construct
  source 1..15: mol_type = other DNA
atcagcgtttttggc

SEQ ID NO: 5192 - DNA, 15 bp, synthetic construct
  source 1..15: mol_type = other DNA
ttccagtaccaaagg

SEQ ID NO: 5193 - DNA, 15 bp, synthetic construct
  source 1..15: mol_type = other DNA
ggctgagtattttgt

SEQ ID NO: 5194 - DNA, 15 bp, synthetic construct
  source 1..15: mol_type = other DNA
gaactcagtgaaaaa

SEQ ID NO: 5195 - DNA, 15 bp, synthetic construct
  source 1..15: mol_type = other DNA
cttcacagggccttt

SEQ ID NO: 5196 - DNA, 15 bp, synthetic construct
  source 1..15: mol_type = other DNA
attcaccaggagcca

SEQ ID NO: 5197 - DNA, 15 bp, synthetic construct
  source 1..15: mol_type = other DNA
gcctatctattgtta

SEQ ID NO: 5198 - DNA, 15 bp, synthetic construct
  source 1..15: mol_type = other DNA
gggttagctgatagg

SEQ ID NO: 5199 - DNA, 15 bp, synthetic construct
  source 1..15: mol_type = other DNA
aagctttcatatgcc

SEQ ID NO: 5200 - DNA, 15 bp, synthetic construct
  source 1..15: mol_type = other DNA
gtgattagtcgtaga

SEQ ID NO: 5201 - DNA, 15 bp, synthetic construct
  source 1..15: mol_type = other DNA
accacttctttggga

SEQ ID NO: 5202 - DNA, 15 bp, synthetic construct
  source 1..15: mol_type = other DNA
aaaaactaaagtacc

SEQ ID NO: 5203 - DNA, 15 bp, synthetic construct
  source 1..15: mol_type = other DNA
catcgaagaatgaaa

SEQ ID NO: 5204 - DNA, 15 bp, synthetic construct
  source 1..15: mol_type = other DNA
gtgtatgttaaatca

SEQ ID NO: 5205 - DNA, 15 bp, synthetic construct
  source 1..15: mol_type = other DNA
tgattcatgactggt

SEQ ID NO: 5206 - DNA, 15 bp, synthetic construct
  source 1..15: mol_type = other DNA
gggaaatacgaactt

SEQ ID NO: 5207 - DNA, 15 bp, synthetic construct
  source 1..15: mol_type = other DNA
tgctttttgtattct

SEQ ID NO: 5208 - DNA, 15 bp, synthetic construct
  source 1..15: mol_type = other DNA
cagttaattgatgct

SEQ ID NO: 5209 - DNA, 15 bp, synthetic construct
  source 1..15: mol_type = other DNA
tgctttttgtattct

SEQ ID NO: 5210 - DNA, 15 bp, synthetic construct
  source 1..15: mol_type = other DNA
cagttaattgatgct

SEQ ID NO: 5211 - DNA, 15 bp, synthetic construct
  source 1..15: mol_type = other DNA
tcaccagtccacgac

SEQ ID NO: 5212 - DNA, 15 bp, synthetic construct
  source 1..15: mol_type = other DNA
aactgcatctggtca

SEQ ID NO: 5213 - DNA, 15 bp, synthetic construct
  source 1..15: mol_type = other DNA
gatgcagttagataa

SEQ ID NO: 5214 - DNA, 15 bp, synthetic construct
  source 1..15: mol_type = other DNA
ttccttctacagcta

SEQ ID NO: 5215 - DNA, 15 bp, synthetic construct
  source 1..15: mol_type = other DNA
aaccagtaataagtt

SEQ ID NO: 5216 - DNA, 15 bp, synthetic construct
  source 1..15: mol_type = other DNA
aaatgtgcgcctcta

SEQ ID NO: 5217 - DNA, 15 bp, synthetic construct
  source 1..15: mol_type = other DNA
attgtgtaatatcct

SEQ ID NO: 5218 - DNA, 15 bp, synthetic construct
  source 1..15: mol_type = other DNA
atatgttttgttgct

SEQ ID NO: 5219 - DNA, 15 bp, synthetic construct
  source 1..15: mol_type = other DNA
cataccagcaggaaa

SEQ ID NO: 5220 - DNA, 15 bp, synthetic construct
  source 1..15: mol_type = other DNA
caggtgcttaagcaa

SEQ ID NO: 5221 - DNA, 15 bp, synthetic construct
  source 1..15: mol_type = other DNA
tgaaggaaaggttac

SEQ ID NO: 5222 - DNA, 15 bp, synthetic construct
  source 1..15: mol_type = other DNA
ttttccatctcaacc

SEQ ID NO: 5223 - DNA, 15 bp, synthetic construct
  source 1..15: mol_type = other DNA
gcaaaatagatccag

SEQ ID NO: 5224 - DNA, 15 bp, synthetic construct
  source 1..15: mol_type = other DNA
ctccaggaatgagtt

SEQ ID NO: 5225 - DNA, 15 bp, synthetic construct
  source 1..15: mol_type = other DNA
ttgctttgcttgatt

SEQ ID NO: 5226 - DNA, 15 bp, synthetic construct
  source 1..15: mol_type = other DNA
tcagtcatagaagca

SEQ ID NO: 5227 - DNA, 15 bp, synthetic construct
  source 1..15: mol_type = other DNA
cacttcatgagattt

SEQ ID NO: 5228 - DNA, 15 bp, synthetic construct
  source 1..15: mol_type = other DNA
tggagtttctgctat

SEQ ID NO: 5229 - DNA, 15 bp, synthetic construct
  source 1..15: mol_type = other DNA
tatttgaggtttgag

SEQ ID NO: 5230 - DNA, 15 bp, synthetic construct
  source 1..15: mol_type = other DNA
gtctgaaagcgtcac

SEQ ID NO: 5231 - DNA, 15 bp, synthetic construct
  source 1..15: mol_type = other DNA
atatgtggacaccac

SEQ ID NO: 5232 - DNA, 15 bp, synthetic construct
  source 1..15: mol_type = other DNA
tcctgccatttgttc

SEQ ID NO: 5233 - DNA, 15 bp, synthetic construct
  source 1..15: mol_type = other DNA
ccatctgtcatctct

SEQ ID NO: 5234 - DNA, 15 bp, synthetic construct
  source 1..15: mol_type = other DNA
aactattagtcttct

SEQ ID NO: 5235 - DNA, 15 bp, synthetic construct
  source 1..15: mol_type = other DNA
aattgctaagtctgc

SEQ ID NO: 5236 - DNA, 15 bp, synthetic construct
  source 1..15: mol_type = other DNA
actctggagaagacc

SEQ ID NO: 5237 - DNA, 15 bp, synthetic construct
  source 1..15: mol_type = other DNA
agttttccgtctgat

SEQ ID NO: 5238 - DNA, 15 bp, synthetic construct
  source 1..15: mol_type = other DNA
agtttcttcatctta

SEQ ID NO: 5239 - DNA, 15 bp, synthetic construct
  source 1..15: mol_type = other DNA
ttactggcaagttac

SEQ ID NO: 5240 - DNA, 15 bp, synthetic construct
  source 1..15: mol_type = other DNA
ttattttcagtttgt

SEQ ID NO: 5241 - DNA, 15 bp, synthetic construct
  source 1..15: mol_type = other DNA
cagtaaccactaatt

SEQ ID NO: 5242 - DNA, 15 bp, synthetic construct
  source 1..15: mol_type = other DNA
ctgcaaagaccaaca

SEQ ID NO: 5243 - DNA, 15 bp, synthetic construct
  source 1..15: mol_type = other DNA
cctgtaaaactctga

SEQ ID NO: 5244 - DNA, 15 bp, synthetic construct
  source 1..15: mol_type = other DNA
cacatatctggctca

SEQ ID NO: 5245 - DNA, 15 bp, synthetic construct
  source 1..15: mol_type = other DNA
cttgcactgagaaag

SEQ ID NO: 5246 - DNA, 15 bp, synthetic construct
  source 1..15: mol_type = other DNA
aacatcctcattttc

SEQ ID NO: 5247 - DNA, 15 bp, synthetic construct
  source 1..15: mol_type = other DNA
ctcacatctatccaa

SEQ ID NO: 5248 - DNA, 15 bp, synthetic construct
  source 1..15: mol_type = other DNA
tgttcaagactttac

SEQ ID NO: 5249 - DNA, 15 bp, synthetic construct
  source 1..15: mol_type = other DNA
ctgcagcaataaaaa

SEQ ID NO: 5250 - DNA, 15 bp, synthetic construct
  source 1..15: mol_type = other DNA
agacctgctgaagta

SEQ ID NO: 5251 - DNA, 15 bp, synthetic construct
  source 1..15: mol_type = other DNA
ttcacaaagctatac

SEQ ID NO: 5252 - DNA, 15 bp, synthetic construct
  source 1..15: mol_type = other DNA
tggctcttgttcttt

SEQ ID NO: 5253 - DNA, 15 bp, synthetic construct
  source 1..15: mol_type = other DNA
gtattccagtttctg

SEQ ID NO: 5254 - DNA, 15 bp, synthetic construct
  source 1..15: mol_type = other DNA
tcactaggcatctgg

SEQ ID NO: 5255 - DNA, 15 bp, synthetic construct
  source 1..15: mol_type = other DNA
accgtcacagacgaa

SEQ ID NO: 5256 - DNA, 15 bp, synthetic construct
  source 1..15: mol_type = other DNA
ccgcgtagtcatcat

SEQ ID NO: 5257 - DNA, 15 bp, synthetic construct
  source 1..15: mol_type = other DNA
tcccttgggtttacc

SEQ ID NO: 5258 - DNA, 15 bp, synthetic construct
  source 1..15: mol_type = other DNA
gcgtactgacgtcac

SEQ ID NO: 5259 - DNA, 15 bp, synthetic construct
  source 1..15: mol_type = other DNA
ttgtttttatttcta

SEQ ID NO: 5260 - DNA, 15 bp, synthetic construct
  source 1..15: mol_type = other DNA
actgttgaactgatt

SEQ ID NO: 5261 - DNA, 15 bp, synthetic construct
  source 1..15: mol_type = other DNA
cattcgcggaaacag

SEQ ID NO: 5262 - DNA, 15 bp, synthetic construct
  source 1..15: mol_type = other DNA
tcaactgcactgctc

SEQ ID NO: 5263 - DNA, 15 bp, synthetic construct
  source 1..15: mol_type = other DNA
acatatagaactgga

SEQ ID NO: 5264 - DNA, 15 bp, synthetic construct
  source 1..15: mol_type = other DNA
acctgtagaaaagga

SEQ ID NO: 5265 - DNA, 15 bp, synthetic construct
  source 1..15: mol_type = other DNA
aacattttctcaact

SEQ ID NO: 5266 - DNA, 15 bp, synthetic construct
  source 1..15: mol_type = other DNA
tgtctgcagcaggta

SEQ ID NO: 5267 - DNA, 15 bp, synthetic construct
  source 1..15: mol_type = other DNA
aacaacacatcacga

SEQ ID NO: 5268 - DNA, 15 bp, synthetic construct
  source 1..15: mol_type = other DNA
tattgcagctgtact

SEQ ID NO: 5269 - DNA, 15 bp, synthetic construct
  source 1..15: mol_type = other DNA
gagtcatggagatca

SEQ ID NO: 5270 - DNA, 15 bp, synthetic construct
  source 1..15: mol_type = other DNA
tcaatgagaactatt

SEQ ID NO: 5271 - DNA, 15 bp, synthetic construct
  source 1..15: mol_type = other DNA
caaggaattgcagaa

SEQ ID NO: 5272 - DNA, 15 bp, synthetic construct
  source 1..15: mol_type = other DNA
ttaagcgttcggaca

SEQ ID NO: 5273 - DNA, 15 bp, synthetic construct
  source 1..15: mol_type = other DNA
aggtgaaccttgtcc

SEQ ID NO: 5274 - DNA, 15 bp, synthetic construct
  source 1..15: mol_type = other DNA
ctgttgttcctatct

SEQ ID NO: 5275 - DNA, 15 bp, synthetic construct
  source 1..15: mol_type = other DNA
ggtggcctacattac

SEQ ID NO: 5276 - DNA, 15 bp, synthetic construct
  source 1..15: mol_type = other DNA
tcctcttttagagca

SEQ ID NO: 5277 - DNA, 15 bp, synthetic construct
  source 1..15: mol_type = other DNA
tggacatgtgcctat

SEQ ID NO: 5278 - DNA, 15 bp, synthetic construct
  source 1..15: mol_type = other DNA
taggagagttgaaag

SEQ ID NO: 5279 - DNA, 15 bp, synthetic construct
  source 1..15: mol_type = other DNA
cagaccaactgtgct

SEQ ID NO: 5280 - DNA, 15 bp, synthetic construct
  source 1..15: mol_type = other DNA
ggtgtaacaacgtca

SEQ ID NO: 5281 - DNA, 15 bp, synthetic construct
  source 1..15: mol_type = other DNA
taaactggagcagat

SEQ ID NO: 5282 - DNA, 15 bp, synthetic construct
  source 1..15: mol_type = other DNA
acttggctatcaata

SEQ ID NO: 5283 - DNA, 15 bp, synthetic construct
  source 1..15: mol_type = other DNA
tgaacaagtgtgaat

SEQ ID NO: 5284 - DNA, 15 bp, synthetic construct
  source 1..15: mol_type = other DNA
ttctgcttctacacc

SEQ ID NO: 5285 - DNA, 15 bp, synthetic construct
  source 1..15: mol_type = other DNA
ccttcagcgcatggg

SEQ ID NO: 5286 - DNA, 15 bp, synthetic construct
  source 1..15: mol_type = other DNA
tgactctgctcaatt

SEQ ID NO: 5287 - DNA, 15 bp, synthetic construct
  source 1..15: mol_type = other DNA
tgatccttcacttag

SEQ ID NO: 5288 - DNA, 15 bp, synthetic construct
  source 1..15: mol_type = other DNA
aagatgctaaagttg

SEQ ID NO: 5289 - DNA, 15 bp, synthetic construct
  source 1..15: mol_type = other DNA
ctactgccctatggg

SEQ ID NO: 5290 - DNA, 15 bp, synthetic construct
  source 1..15: mol_type = other DNA
gggtttgataatgaa

SEQ ID NO: 5291 - DNA, 15 bp, synthetic construct
  source 1..15: mol_type = other DNA
cataactctgcagtt

SEQ ID NO: 5292 - DNA, 15 bp, synthetic construct
  source 1..15: mol_type = other DNA
ctggaatgtacttaa

SEQ ID NO: 5293 - DNA, 15 bp, synthetic construct
  source 1..15: mol_type = other DNA
agaacgcaaactcct

SEQ ID NO: 5294 - DNA, 15 bp, synthetic construct
  source 1..15: mol_type = other DNA
ccttgaaaacattga

SEQ ID NO: 5295 - DNA, 15 bp, synthetic construct
  source 1..15: mol_type = other DNA
tgtatctggttttga

SEQ ID NO: 5296 - DNA, 15 bp, synthetic construct
  source 1..15: mol_type = other DNA
gggaaagttaaaagg

SEQ ID NO: 5297 - DNA, 15 bp, synthetic construct
  source 1..15: mol_type = other DNA
gcaggagcgatgtac

SEQ ID NO: 5298 - DNA, 15 bp, synthetic construct
  source 1..15: mol_type = other DNA
ataaacggtcatgtt

SEQ ID NO: 5299 - DNA, 15 bp, synthetic construct
  source 1..15: mol_type = other DNA
tttgactccagctaa

SEQ ID NO: 5300 - DNA, 15 bp, synthetic construct
  source 1..15: mol_type = other DNA
agaattgtcctgctt

SEQ ID NO: 5301 - DNA, 15 bp, synthetic construct
  source 1..15: mol_type = other DNA
attcattccagcttg

SEQ ID NO: 5302 - DNA, 15 bp, synthetic construct
  source 1..15: mol_type = other DNA
gatttcaaggcagga

SEQ ID NO: 5303 - DNA, 15 bp, synthetic construct
  source 1..15: mol_type = other DNA
ctacacactaggaaa

SEQ ID NO: 5304 - DNA, 15 bp, synthetic construct
  source 1..15: mol_type = other DNA
gcagcatgttaaatg

SEQ ID NO: 5305 - DNA, 15 bp, synthetic construct
  source 1..15: mol_type = other DNA
catgtataaagccat

SEQ ID NO: 5306 - DNA, 15 bp, synthetic construct
  source 1..15: mol_type = other DNA
tccactacaggattg

SEQ ID NO: 5307 - DNA, 15 bp, synthetic construct
  source 1..15: mol_type = other DNA
ggtctctagccgatc

SEQ ID NO: 5308 - DNA, 15 bp, synthetic construct
  source 1..15: mol_type = other DNA
atttttcctttatgg

SEQ ID NO: 5309 - DNA, 15 bp, synthetic construct
  source 1..15: mol_type = other DNA
cctaaaattcctgat

SEQ ID NO: 5310 - DNA, 15 bp, synthetic construct
  source 1..15: mol_type = other DNA
gccagcttaatattg

SEQ ID NO: 5311 - DNA, 15 bp, synthetic construct
  source 1..15: mol_type = other DNA
catctggttctggtt

SEQ ID NO: 5312 - DNA, 15 bp, synthetic construct
  source 1..15: mol_type = other DNA
gatccacgctttcca

SEQ ID NO: 5313 - DNA, 15 bp, synthetic construct
  source 1..15: mol_type = other DNA
aaggcattgtttaca

SEQ ID NO: 5314 - DNA, 15 bp, synthetic construct
  source 1..15: mol_type = other DNA
ctcaagtccgttaag

SEQ ID NO: 5315 - DNA, 15 bp, synthetic construct
  source 1..15: mol_type = other DNA
agattttacactgca

SEQ ID NO: 5316 - DNA, 15 bp, synthetic construct
  source 1..15: mol_type = other DNA
aacatgacatcttcg

SEQ ID NO: 5317 - DNA, 15 bp, synthetic construct
  source 1..15: mol_type = other DNA
cgattttcaacatta

SEQ ID NO: 5318 - DNA, 15 bp, synthetic construct
  source 1..15: mol_type = other DNA
ccttgagatcattta

SEQ ID NO: 5319 - DNA, 15 bp, synthetic construct
  source 1..15: mol_type = other DNA
tcatgacacatgata

SEQ ID NO: 5320 - DNA, 15 bp, synthetic construct
  source 1..15: mol_type = other DNA
tgggtttatatatgg

SEQ ID NO: 5321 - DNA, 15 bp, synthetic construct
  source 1..15: mol_type = other DNA
gctcataggaatagt

SEQ ID NO: 5322 - DNA, 15 bp, synthetic construct
  source 1..15: mol_type = other DNA
gaggaccgatgagaa

SEQ ID NO: 5323 - DNA, 15 bp, synthetic construct
  source 1..15: mol_type = other DNA
ttgtttggaatagca

SEQ ID NO: 5324 - DNA, 15 bp, synthetic construct
  source 1..15: mol_type = other DNA
gcaattttagaatgt

SEQ ID NO: 5325 - DNA, 15 bp, synthetic construct
  source 1..15: mol_type = other DNA
gctttaccttttgta

SEQ ID NO: 5326 - DNA, 15 bp, synthetic construct
  source 1..15: mol_type = other DNA
ataataactgccaag

SEQ ID NO: 5327 - DNA, 15 bp, synthetic construct
  source 1..15: mol_type = other DNA
ctcaatctcataagg

SEQ ID NO: 5328 - DNA, 15 bp, synthetic construct
  source 1..15: mol_type = other DNA
cctatgaaggcactg

SEQ ID NO: 5329 - DNA, 15 bp, synthetic construct
  source 1..15: mol_type = other DNA
ggaaccctcaatcag

SEQ ID NO: 5330 - DNA, 15 bp, synthetic construct
  source 1..15: mol_type = other DNA
taaccggacctggca

SEQ ID NO: 5331 - DNA, 15 bp, synthetic construct
  source 1..15: mol_type = other DNA
gtaagtggaggtagt

SEQ ID NO: 5332 - DNA, 15 bp, synthetic construct
  source 1..15: mol_type = other DNA
atgatgtcctccaaa

SEQ ID NO: 5333 - DNA, 15 bp, synthetic construct
  source 1..15: mol_type = other DNA
atcgcaataaacaga

SEQ ID NO: 5334 - DNA, 15 bp, synthetic construct
  source 1..15: mol_type = other DNA
gtaagtgcatccttt

SEQ ID NO: 5335 - DNA, 15 bp, synthetic construct
  source 1..15: mol_type = other DNA
cagaaatatttaact

SEQ ID NO: 5336 - DNA, 15 bp, synthetic construct
  source 1..15: mol_type = other DNA
cccgtggtaaatctt

SEQ ID NO: 5337 - DNA, 15 bp, synthetic construct
  source 1..15: mol_type = other DNA
actcgtgctactagt

SEQ ID NO: 5338 - DNA, 15 bp, synthetic construct
  source 1..15: mol_type = other DNA
aggtactctggatgg

SEQ ID NO: 5339 - DNA, 15 bp, synthetic construct
  source 1..15: mol_type = other DNA
agaaacctgggaatg

SEQ ID NO: 5340 - DNA, 15 bp, synthetic construct
  source 1..15: mol_type = other DNA
ggtcacctctggtag

SEQ ID NO: 5341 - DNA, 15 bp, synthetic construct
  source 1..15: mol_type = other DNA
agagcatgaacgacg

SEQ ID NO: 5342 - DNA, 15 bp, synthetic construct
  source 1..15: mol_type = other DNA
tctgtatctggtagt

SEQ ID NO: 5343 - DNA, 15 bp, synthetic construct
  source 1..15: mol_type = other DNA
attcagagtgccatt

SEQ ID NO: 5344 - DNA, 15 bp, synthetic construct
  source 1..15: mol_type = other DNA
aagtactggaaaccg

SEQ ID NO: 5345 - DNA, 15 bp, synthetic construct
  source 1..15: mol_type = other DNA
cagtacttccagttc

SEQ ID NO: 5346 - DNA, 15 bp, synthetic construct
  source 1..15: mol_type = other DNA
gacctggtggaaatg

SEQ ID NO: 5347 - DNA, 15 bp, synthetic construct
  source 1..15: mol_type = other DNA
ccataagaggtggag

SEQ ID NO: 5348 - DNA, 15 bp, synthetic construct
  source 1..15: mol_type = other DNA
tgaaggactatgaag

SEQ ID NO: 5349 - DNA, 15 bp, synthetic construct
  source 1..15: mol_type = other DNA
tcatttttatcagtg

SEQ ID NO: 5350 - DNA, 15 bp, synthetic construct
  source 1..15: mol_type = other DNA
ttaactaccaggaac

SEQ ID NO: 5351 - DNA, 15 bp, synthetic construct
  source 1..15: mol_type = other DNA
actcagtgcataact

SEQ ID NO: 5352 - DNA, 15 bp, synthetic construct
  source 1..15: mol_type = other DNA
aataaccatattttc

SEQ ID NO: 5353 - DNA, 15 bp, synthetic construct
  source 1..15: mol_type = other DNA
ggatgaaattgtcat

SEQ ID NO: 5354 - DNA, 15 bp, synthetic construct
  source 1..15: mol_type = other DNA
aaagggttgattgat

SEQ ID NO: 5355 - DNA, 15 bp, synthetic construct
  source 1..15: mol_type = other DNA
agaatccttattgtt

SEQ ID NO: 5356 - DNA, 15 bp, synthetic construct
  source 1..15: mol_type = other DNA
acttttaagccaact

SEQ ID NO: 5357 - DNA, 15 bp, synthetic construct
  source 1..15: mol_type = other DNA
gggaccaatcaggtc

SEQ ID NO: 5358 - DNA, 15 bp, synthetic construct
  source 1..15: mol_type = other DNA
tctggctaacattgc

SEQ ID NO: 5359 - DNA, 15 bp, synthetic construct
  source 1..15: mol_type = other DNA
gtgtcaggacataga

SEQ ID NO: 5360 - DNA, 15 bp, synthetic construct
  source 1..15: mol_type = other DNA
aaccaaacctcttgc

SEQ ID NO: 5361 - DNA, 15 bp, synthetic construct
  source 1..15: mol_type = other DNA
tccgaccgagagtcc

SEQ ID NO: 5362 - DNA, 15 bp, synthetic construct
  source 1..15: mol_type = other DNA
ctgagaaagctgatg

SEQ ID NO: 5363 - DNA, 15 bp, synthetic construct
  source 1..15: mol_type = other DNA
tcaaagtgttcacct

SEQ ID NO: 5364 - DNA, 15 bp, synthetic construct
  source 1..15: mol_type = other DNA
gtaattcgaggcaca

SEQ ID NO: 5365 - DNA, 15 bp, synthetic construct
  source 1..15: mol_type = other DNA
ttcatgccttaaaaa

SEQ ID NO: 5366 - DNA, 15 bp, synthetic construct
  source 1..15: mol_type = other DNA
taaagccacaaaata

SEQ ID NO: 5367 - DNA, 15 bp, synthetic construct
  source 1..15: mol_type = other DNA
taaagcacagtggat

SEQ ID NO: 5368 - DNA, 15 bp, synthetic construct
  source 1..15: mol_type = other DNA
tgagctcctatctgg

SEQ ID NO: 5369 - DNA, 15 bp, synthetic construct
  source 1..15: mol_type = other DNA
gctgttcgtctaaaa

SEQ ID NO: 5370 - DNA, 15 bp, synthetic construct
  source 1..15: mol_type = other DNA
tgaaaagggtttcct

SEQ ID NO: 5371 - DNA, 15 bp, synthetic construct
  source 1..15: mol_type = other DNA
cagagaaaggattca

SEQ ID NO: 5372 - DNA, 15 bp, synthetic construct
  source 1..15: mol_type = other DNA
acctggaagaattgg

SEQ ID NO: 5373 - DNA, 15 bp, synthetic construct
  source 1..15: mol_type = other DNA
taacactcctgtaac

SEQ ID NO: 5374 - DNA, 15 bp, synthetic construct
  source 1..15: mol_type = other DNA
gacaaaagaactgag

SEQ ID NO: 5375 - DNA, 15 bp, synthetic construct
  source 1..15: mol_type = other DNA
gaccatcaatgtagc

SEQ ID NO: 5376 - DNA, 15 bp, synthetic construct
  source 1..15: mol_type = other DNA
atacaaacctcagca

SEQ ID NO: 5377 - DNA, 15 bp, synthetic construct
  source 1..15: mol_type = other DNA
ttgtacgcttgggac

SEQ ID NO: 5378 - DNA, 15 bp, synthetic construct
  source 1..15: mol_type = other DNA
caagtactctttgga

SEQ ID NO: 5379 - DNA, 15 bp, synthetic construct
  source 1..15: mol_type = other DNA
aagaaacctaaggct

SEQ ID NO: 5380 - DNA, 15 bp, synthetic construct
  source 1..15: mol_type = other DNA
ttctgttgtttgtcg

SEQ ID NO: 5381 - DNA, 15 bp, synthetic construct
  source 1..15: mol_type = other DNA
ttctacatctgaatc

SEQ ID NO: 5382 - DNA, 15 bp, synthetic construct
  source 1..15: mol_type = other DNA
caggatacctccttc

SEQ ID NO: 5383 - DNA, 15 bp, synthetic construct
  source 1..15: mol_type = other DNA
tgcagaaggttgcca

SEQ ID NO: 5384 - DNA, 15 bp, synthetic construct
  source 1..15: mol_type = other DNA
aaaaatatcgcaaat

SEQ ID NO: 5385 - DNA, 15 bp, synthetic construct
  source 1..15: mol_type = other DNA
aagttttatgcattg

SEQ ID NO: 5386 - DNA, 15 bp, synthetic construct
  source 1..15: mol_type = other DNA
gcagaattttcccta

SEQ ID NO: 5387 - DNA, 15 bp, synthetic construct
  source 1..15: mol_type = other DNA
ctgcacatagtgctc

SEQ ID NO: 5388 - DNA, 15 bp, synthetic construct
  source 1..15: mol_type = other DNA
tttccaccttccaag

SEQ ID NO: 5389 - DNA, 15 bp, synthetic construct
  source 1..15: mol_type = other DNA
actatcagaatccat

SEQ ID NO: 5390 - DNA, 15 bp, synthetic construct
  source 1..15: mol_type = other DNA
ataaaagttggaaga

SEQ ID NO: 5391 - DNA, 15 bp, synthetic construct
  source 1..15: mol_type = other DNA
cctttgctcaattca

SEQ ID NO: 5392 - DNA, 15 bp, synthetic construct
  source 1..15: mol_type = other DNA
ttccacttttcattg

SEQ ID NO: 5393 - DNA, 15 bp, synthetic construct
  source 1..15: mol_type = other DNA
tttatgaatgttccc

SEQ ID NO: 5394 - DNA, 15 bp, synthetic construct
  source 1..15: mol_type = other DNA
tagttttctttgcat

SEQ ID NO: 5395 - DNA, 15 bp, synthetic construct
  source 1..15: mol_type = other DNA
ctatcaaagtagcaa

SEQ ID NO: 5396 - DNA, 15 bp, synthetic construct
  source 1..15: mol_type = other DNA
ctcaatatccagtaa

SEQ ID NO: 5397 - DNA, 15 bp, synthetic construct
  source 1..15: mol_type = other DNA
actgggtgtatatgg

SEQ ID NO: 5398 - DNA, 15 bp, synthetic construct
  source 1..15: mol_type = other DNA
atgactagccctcaa

SEQ ID NO: 5399 - DNA, 15 bp, synthetic construct
  source 1..15: mol_type = other DNA
tttctttggtgtgat

SEQ ID NO: 5400 - DNA, 15 bp, synthetic construct
  source 1..15: mol_type = other DNA
taaggttaagtgtgc

SEQ ID NO: 5401 - DNA, 15 bp, synthetic construct
  source 1..15: mol_type = other DNA
gagtggtactaatca

SEQ ID NO: 5402 - DNA, 15 bp, synthetic construct
  source 1..15: mol_type = other DNA
taaaggaagctggat

SEQ ID NO: 5403 - DNA, 15 bp, synthetic construct
  source 1..15: mol_type = other DNA
tggctactctttcct

SEQ ID NO: 5404 - DNA, 15 bp, synthetic construct
  source 1..15: mol_type = other DNA
gtttacattccattg

SEQ ID NO: 5405 - DNA, 15 bp, synthetic construct
  source 1..15: mol_type = other DNA
actgggtggtacctg

SEQ ID NO: 5406 - DNA, 15 bp, synthetic construct
  source 1..15: mol_type = other DNA
attcttataaaggtt

SEQ ID NO: 5407 - DNA, 15 bp, synthetic construct
  source 1..15: mol_type = other DNA
ccactgaagcttgtt

SEQ ID NO: 5408 - DNA, 15 bp, synthetic construct
  source 1..15: mol_type = other DNA
ttagcatgaacaaga

SEQ ID NO: 5409 - DNA, 15 bp, synthetic construct
  source 1..15: mol_type = other DNA
tcacaaaatggatgt

SEQ ID NO: 5410 - DNA, 15 bp, synthetic construct
  source 1..15: mol_type = other DNA
aacatcagcatcttt

SEQ ID NO: 5411 - DNA, 15 bp, synthetic construct
  source 1..15: mol_type = other DNA
ggaaatcttaccttc

SEQ ID NO: 5412 - DNA, 15 bp, synthetic construct
  source 1..15: mol_type = other DNA
caattacagaaagtt

SEQ ID NO: 5413 - DNA, 15 bp, synthetic construct
  source 1..15: mol_type = other DNA
cttcaaacatagcac

SEQ ID NO: 5414 - DNA, 15 bp, synthetic construct
  source 1..15: mol_type = other DNA
tgagttattcagtct

SEQ ID NO: 5415 - DNA, 15 bp, synthetic construct
  source 1..15: mol_type = other DNA
aggtccaaaactctg

SEQ ID NO: 5416 - DNA, 15 bp, synthetic construct
  source 1..15: mol_type = other DNA
cagatttacaagagc

SEQ ID NO: 5417 - DNA, 15 bp, synthetic construct
  source 1..15: mol_type = other DNA
aggttgttccctaag

SEQ ID NO: 5418 - DNA, 15 bp, synthetic construct
  source 1..15: mol_type = other DNA
ttaccggtgaaaaac

SEQ ID NO: 5419 - DNA, 15 bp, synthetic construct
  source 1..15: mol_type = other DNA
agaggttaatgagtt

SEQ ID NO: 5420 - DNA, 15 bp, synthetic construct
  source 1..15: mol_type = other DNA
acatgttcacttcca

SEQ ID NO: 5421 - DNA, 15 bp, synthetic construct
  source 1..15: mol_type = other DNA
cggtgggaacatcca

SEQ ID NO: 5422 - DNA, 15 bp, synthetic construct
  source 1..15: mol_type = other DNA
tcctctagctctaaa

SEQ ID NO: 5423 - DNA, 15 bp, synthetic construct
  source 1..15: mol_type = other DNA
tggatgtgtgtttgt

SEQ ID NO: 5424 - DNA, 15 bp, synthetic construct
  source 1..15: mol_type = other DNA
agttcaatcagttca

SEQ ID NO: 5425 - DNA, 15 bp, synthetic construct
  source 1..15: mol_type = other DNA
atgcgagtgagatcg

SEQ ID NO: 5426 - DNA, 15 bp, synthetic construct
  source 1..15: mol_type = other DNA
tgttacatactgtgc

SEQ ID NO: 5427 - DNA, 15 bp, synthetic construct
  source 1..15: mol_type = other DNA
tgataaggaatgctt

SEQ ID NO: 5428 - DNA, 15 bp, synthetic construct
  source 1..15: mol_type = other DNA
gtttttaattggtgt

SEQ ID NO: 5429 - DNA, 15 bp, synthetic construct
  source 1..15: mol_type = other DNA
tgggttttaaaatgt

SEQ ID NO: 5430 - DNA, 15 bp, synthetic construct
  source 1..15: mol_type = other DNA
tttgctttgagatgt

SEQ ID NO: 5431 - DNA, 15 bp, synthetic construct
  source 1..15: mol_type = other DNA
aggcagtcataaaaa

SEQ ID NO: 5432 - DNA, 15 bp, synthetic construct
  source 1..15: mol_type = other DNA
gttgattctcctgtt

SEQ ID NO: 5433 - DNA, 15 bp, synthetic construct
  source 1..15: mol_type = other DNA
tcaatgacatctgtg

SEQ ID NO: 5434 - DNA, 15 bp, synthetic construct
  source 1..15: mol_type = other DNA
aatgcagctttttga

SEQ ID NO: 5435 - DNA, 15 bp, synthetic construct
  source 1..15: mol_type = other DNA
catttggacaatccc

SEQ ID NO: 5436 - DNA, 15 bp, synthetic construct
  source 1..15: mol_type = other DNA
attctgttctaaaga

SEQ ID NO: 5437 - DNA, 15 bp, synthetic construct
  source 1..15: mol_type = other DNA
ctccttaccacttct

SEQ ID NO: 5438 - DNA, 15 bp, synthetic construct
  source 1..15: mol_type = other DNA
tggataaaagactca

SEQ ID NO: 5439 - DNA, 15 bp, synthetic construct
  source 1..15: mol_type = other DNA
cttctaagtgttcat

SEQ ID NO: 5440 - DNA, 15 bp, synthetic construct
  source 1..15: mol_type = other DNA
gatgccaaagagcat

SEQ ID NO: 5441 - DNA, 15 bp, synthetic construct
  source 1..15: mol_type = other DNA
gcgatcagatgaaac

SEQ ID NO: 5442 - DNA, 15 bp, synthetic construct
  source 1..15: mol_type = other DNA
aaaagaccaacaatg

SEQ ID NO: 5443 - DNA, 15 bp, synthetic construct
  source 1..15: mol_type = other DNA
gcgatcagatgaaac

SEQ ID NO: 5444 - DNA, 15 bp, synthetic construct
  source 1..15: mol_type = other DNA
aaaagaccaacaatg

SEQ ID NO: 5445 - DNA, 15 bp, synthetic construct
  source 1..15: mol_type = other DNA
tttcctttttcatct

SEQ ID NO: 5446 - DNA, 15 bp, synthetic construct
  source 1..15: mol_type = other DNA
tgtatctatctgcat

SEQ ID NO: 5447 - DNA, 15 bp, synthetic construct
  source 1..15: mol_type = other DNA
tttcctttttcatct

SEQ ID NO: 5448 - DNA, 15 bp, synthetic construct
  source 1..15: mol_type = other DNA
tgtatctatctgcat

SEQ ID NO: 5449 - DNA, 15 bp, synthetic construct
  source 1..15: mol_type = other DNA
ttctgaatcttagga

SEQ ID NO: 5450 - DNA, 15 bp, synthetic construct
  source 1..15: mol_type = other DNA
agtgatctggtaggt

SEQ ID NO: 5451 - DNA, 15 bp, synthetic construct
  source 1..15: mol_type = other DNA
tacccaggaagagct

SEQ ID NO: 5452 - DNA, 15 bp, synthetic construct
  source 1..15: mol_type = other DNA
tctggtaactcattt

SEQ ID NO: 5453 - DNA, 15 bp, synthetic construct
  source 1..15: mol_type = other DNA
ctatctcagctttca

SEQ ID NO: 5454 - DNA, 15 bp, synthetic construct
  source 1..15: mol_type = other DNA
ttcacagagctctgc

SEQ ID NO: 5455 - DNA, 15 bp, synthetic construct
  source 1..15: mol_type = other DNA
gttaatggcacagca

SEQ ID NO: 5456 - DNA, 15 bp, synthetic construct
  source 1..15: mol_type = other DNA
tcaatagctttgctt

SEQ ID NO: 5457 - DNA, 15 bp, synthetic construct
  source 1..15: mol_type = other DNA
tatgtgatggaggta

SEQ ID NO: 5458 - DNA, 15 bp, synthetic construct
  source 1..15: mol_type = other DNA
tgttatcacagttta

SEQ ID NO: 5459 - DNA, 15 bp, synthetic construct
  source 1..15: mol_type = other DNA
attccagaccttcac

SEQ ID NO: 5460 - DNA, 15 bp, synthetic construct
  source 1..15: mol_type = other DNA
gttcaggatggctga

SEQ ID NO: 5461 - DNA, 15 bp, synthetic construct
  source 1..15: mol_type = other DNA
gtatgacaaacgaca

SEQ ID NO: 5462 - DNA, 15 bp, synthetic construct
  source 1..15: mol_type = other DNA
gaagttgcttatgct

SEQ ID NO: 5463 - DNA, 15 bp, synthetic construct
  source 1..15: mol_type = other DNA
gcaaagcataagcaa

SEQ ID NO: 5464 - DNA, 15 bp, synthetic construct
  source 1..15: mol_type = other DNA
tataagataaacatg

SEQ ID NO: 5465 - DNA, 15 bp, synthetic construct
  source 1..15: mol_type = other DNA
caacacaagttacat

SEQ ID NO: 5466 - DNA, 15 bp, synthetic construct
  source 1..15: mol_type = other DNA
agggccagggaacaa

SEQ ID NO: 5467 - DNA, 15 bp, synthetic construct
  source 1..15: mol_type = other DNA
tttacttcaccactt

SEQ ID NO: 5468 - DNA, 15 bp, synthetic construct
  source 1..15: mol_type = other DNA
gaacaaatgaaaagg

SEQ ID NO: 5469 - DNA, 15 bp, synthetic construct
  source 1..15: mol_type = other DNA
tttacttcaccactt

SEQ ID NO: 5470 - DNA, 15 bp, synthetic construct
  source 1..15: mol_type = other DNA
gaacaaatgaaaagg

SEQ ID NO: 5471 - DNA, 15 bp, synthetic construct
  source 1..15: mol_type = other DNA
ctttccttttcttgc

SEQ ID NO: 5472 - DNA, 15 bp, synthetic construct
  source 1..15: mol_type = other DNA
ggctggaatttattg

SEQ ID NO: 5473 - DNA, 15 bp, synthetic construct
  source 1..15: mol_type = other DNA
ctttccttttcttgc

SEQ ID NO: 5474 - DNA, 15 bp, synthetic construct
  source 1..15: mol_type = other DNA
ggctggaatttattg

SEQ ID NO: 5475 - DNA, 15 bp, synthetic construct
  source 1..15: mol_type = other DNA
tacaactcttgaacc

SEQ ID NO: 5476 - DNA, 15 bp, synthetic construct
  source 1..15: mol_type = other DNA
tgaacatacctctgc

SEQ ID NO: 5477 - DNA, 15 bp, synthetic construct
  source 1..15: mol_type = other DNA
ggctttatagtaaga

SEQ ID NO: 5478 - DNA, 15 bp, synthetic construct
  source 1..15: mol_type = other DNA
ggaagtattgacttt

SEQ ID NO: 5479 - DNA, 15 bp, synthetic construct
  source 1..15: mol_type = other DNA
gaattgagctgcaat

SEQ ID NO: 5480 - DNA, 15 bp, synthetic construct
  source 1..15: mol_type = other DNA
aaaagaccagcttca

SEQ ID NO: 5481 - DNA, 15 bp, synthetic construct
  source 1..15: mol_type = other DNA
gcaggcataacagaa

SEQ ID NO: 5482 - DNA, 15 bp, synthetic construct
  source 1..15: mol_type = other DNA
cttttagcttctgtc

SEQ ID NO: 5483 - DNA, 15 bp, synthetic construct
  source 1..15: mol_type = other DNA
cttactacatctaca

SEQ ID NO: 5484 - DNA, 15 bp, synthetic construct
  source 1..15: mol_type = other DNA
tactactgaaaaagg

SEQ ID NO: 5485 - DNA, 15 bp, synthetic construct
  source 1..15: mol_type = other DNA
gctaagcaacataac

SEQ ID NO: 5486 - DNA, 15 bp, synthetic construct
  source 1..15: mol_type = other DNA
ggcagtatgaaaaac

SEQ ID NO: 5487 - DNA, 15 bp, synthetic construct
  source 1..15: mol_type = other DNA
ctgcggagatcatag

SEQ ID NO: 5488 - DNA, 15 bp, synthetic construct
  source 1..15: mol_type = other DNA
aactttgctctagaa

SEQ ID NO: 5489 - DNA, 15 bp, synthetic construct
  source 1..15: mol_type = other DNA
gatgagggttacctg

SEQ ID NO: 5490 - DNA, 15 bp, synthetic construct
  source 1..15: mol_type = other DNA
tatttttccaaaaca

SEQ ID NO: 5491 - DNA, 15 bp, synthetic construct
  source 1..15: mol_type = other DNA
taaacatgacaacaa

SEQ ID NO: 5492 - DNA, 15 bp, synthetic construct
  source 1..15: mol_type = other DNA
atgcgatctgctgta

SEQ ID NO: 5493 - DNA, 15 bp, synthetic construct
  source 1..15: mol_type = other DNA
tgtcccaataaagca

SEQ ID NO: 5494 - DNA, 15 bp, synthetic construct
  source 1..15: mol_type = other DNA
actggactgtaacaa

SEQ ID NO: 5495 - DNA, 15 bp, synthetic construct
  source 1..15: mol_type = other DNA
ataatctgatgcaca

SEQ ID NO: 5496 - DNA, 15 bp, synthetic construct
  source 1..15: mol_type = other DNA
aaagagaggcttgac

SEQ ID NO: 5497 - DNA, 15 bp, synthetic construct
  source 1..15: mol_type = other DNA
tgagatgggcaactg

SEQ ID NO: 5498 - DNA, 15 bp, synthetic construct
  source 1..15: mol_type = other DNA
aagcgaataaatgct

SEQ ID NO: 5499 - DNA, 15 bp, synthetic construct
  source 1..15: mol_type = other DNA
ttacctgatcctctt

SEQ ID NO: 5500 - DNA, 15 bp, synthetic construct
  source 1..15: mol_type = other DNA
tataccttgactttg

SEQ ID NO: 5501 - DNA, 15 bp, synthetic construct
  source 1..15: mol_type = other DNA
agaatgcattcacaa

SEQ ID NO: 5502 - DNA, 15 bp, synthetic construct
  source 1..15: mol_type = other DNA
atttaagatgtccag

SEQ ID NO: 5503 - DNA, 15 bp, synthetic construct
  source 1..15: mol_type = other DNA
tgcttcatgtttgcc

SEQ ID NO: 5504 - DNA, 15 bp, synthetic construct
  source 1..15: mol_type = other DNA
ctaatctagtttgga

SEQ ID NO: 5505 - DNA, 15 bp, synthetic construct
  source 1..15: mol_type = other DNA
ccattactcatgaaa

SEQ ID NO: 5506 - DNA, 15 bp, synthetic construct
  source 1..15: mol_type = other DNA
ctgtaaagatgcctt

SEQ ID NO: 5507 - DNA, 15 bp, synthetic construct
  source 1..15: mol_type = other DNA
cggattactcacatc

SEQ ID NO: 5508 - DNA, 15 bp, synthetic construct
  source 1..15: mol_type = other DNA
atcaaagacacttcg

SEQ ID NO: 5509 - DNA, 15 bp, synthetic construct
  source 1..15: mol_type = other DNA
ctcggactccacttc

SEQ ID NO: 5510 - DNA, 15 bp, synthetic construct
  source 1..15: mol_type = other DNA
ttcttcatcaagaaa

SEQ ID NO: 5511 - DNA, 15 bp, synthetic construct
  source 1..15: mol_type = other DNA
tgccttttgtttgag

SEQ ID NO: 5512 - DNA, 15 bp, synthetic construct
  source 1..15: mol_type = other DNA
gatacggactattac

SEQ ID NO: 5513 - DNA, 15 bp, synthetic construct
  source 1..15: mol_type = other DNA
aaatcactttcgatg

SEQ ID NO: 5514 - DNA, 15 bp, synthetic construct
  source 1..15: mol_type = other DNA
ttgtgtctttgatac

SEQ ID NO: 5515 - DNA, 15 bp, synthetic construct
  source 1..15: mol_type = other DNA
tagtgcgtctacatt

SEQ ID NO: 5516 - DNA, 15 bp, synthetic construct
  source 1..15: mol_type = other DNA
gcccatatacttact

SEQ ID NO: 5517 - DNA, 15 bp, synthetic construct
  source 1..15: mol_type = other DNA
tatctcaagtgacac

SEQ ID NO: 5518 - DNA, 15 bp, synthetic construct
  source 1..15: mol_type = other DNA
caagaaacaatctgg

SEQ ID NO: 5519 - DNA, 15 bp, synthetic construct
  source 1..15: mol_type = other DNA
tagcagatccttcga

SEQ ID NO: 5520 - DNA, 15 bp, synthetic construct
  source 1..15: mol_type = other DNA
atttttactggtggt

SEQ ID NO: 5521 - DNA, 15 bp, synthetic construct
  source 1..15: mol_type = other DNA
tcagcctgatgcttc

SEQ ID NO: 5522 - DNA, 15 bp, synthetic construct
  source 1..15: mol_type = other DNA
gagtgctctggaaac

SEQ ID NO: 5523 - DNA, 15 bp, synthetic construct
  source 1..15: mol_type = other DNA
aaacacaacgattcc

SEQ ID NO: 5524 - DNA, 15 bp, synthetic construct
  source 1..15: mol_type = other DNA
gagcctgacatacgc

SEQ ID NO: 5525 - DNA, 15 bp, synthetic construct
  source 1..15: mol_type = other DNA
gtcaatatgacgcta

SEQ ID NO: 5526 - DNA, 15 bp, synthetic construct
  source 1..15: mol_type = other DNA
ttgctaatgtgttct

SEQ ID NO: 5527 - DNA, 15 bp, synthetic construct
  source 1..15: mol_type = other DNA
acgtgcagacttttt

SEQ ID NO: 5528 - DNA, 15 bp, synthetic construct
  source 1..15: mol_type = other DNA
ccgatttaggttatt

SEQ ID NO: 5529 - DNA, 15 bp, synthetic construct
  source 1..15: mol_type = other DNA
gacgcttatctcaca

SEQ ID NO: 5530 - DNA, 15 bp, synthetic construct
  source 1..15: mol_type = other DNA
ctctcttcaattctg

SEQ ID NO: 5531 - DNA, 15 bp, synthetic construct
  source 1..15: mol_type = other DNA
taaatgtacacacgt

SEQ ID NO: 5532 - DNA, 15 bp, synthetic construct
  source 1..15: mol_type = other DNA
caagttggtaatggt

SEQ ID NO: 5533 - DNA, 15 bp, synthetic construct
  source 1..15: mol_type = other DNA
accgactcttcgatg

SEQ ID NO: 5534 - DNA, 15 bp, synthetic construct
  source 1..15: mol_type = other DNA
tgaatggaaactatg

SEQ ID NO: 5535 - DNA, 15 bp, synthetic construct
  source 1..15: mol_type = other DNA
tccaggttcagggtt

SEQ ID NO: 5536 - DNA, 15 bp, synthetic construct
  source 1..15: mol_type = other DNA
ctctcattgaaggtt

SEQ ID NO: 5537 - DNA, 15 bp, synthetic construct
  source 1..15: mol_type = other DNA
ttccactaagatgca

SEQ ID NO: 5538 - DNA, 15 bp, synthetic construct
  source 1..15: mol_type = other DNA
tcacagggagttcat

SEQ ID NO: 5539 - DNA, 15 bp, synthetic construct
  source 1..15: mol_type = other DNA
tcagtttcatctcta

SEQ ID NO: 5540 - DNA, 15 bp, synthetic construct
  source 1..15: mol_type = other DNA
gggcttttcattaag

SEQ ID NO: 5541 - DNA, 15 bp, synthetic construct
  source 1..15: mol_type = other DNA
aacaatgaaaccgat

SEQ ID NO: 5542 - DNA, 15 bp, synthetic construct
  source 1..15: mol_type = other DNA
aggtgatgttcttga

SEQ ID NO: 5543 - DNA, 15 bp, synthetic construct
  source 1..15: mol_type = other DNA
tcatacactcatgtg

SEQ ID NO: 5544 - DNA, 15 bp, synthetic construct
  source 1..15: mol_type = other DNA
tcaacaaaacaactt

SEQ ID NO: 5545 - DNA, 15 bp, synthetic construct
  source 1..15: mol_type = other DNA
atgtcagtcacggaa

SEQ ID NO: 5546 - DNA, 15 bp, synthetic construct
  source 1..15: mol_type = other DNA
gagatgttgaaccac

SEQ ID NO: 5547 - DNA, 15 bp, synthetic construct
  source 1..15: mol_type = other DNA
caccaacgaattctt

SEQ ID NO: 5548 - DNA, 15 bp, synthetic construct
  source 1..15: mol_type = other DNA
aggacgtgtatgata

SEQ ID NO: 5549 - DNA, 15 bp, synthetic construct
  source 1..15: mol_type = other DNA
acaggttgtccatct

SEQ ID NO: 5550 - DNA, 15 bp, synthetic construct
  source 1..15: mol_type = other DNA
caaaggtgattttat

SEQ ID NO: 5551 - DNA, 15 bp, synthetic construct
  source 1..15: mol_type = other DNA
aaaatggaaggtatg

SEQ ID NO: 5552 - DNA, 15 bp, synthetic construct
  source 1..15: mol_type = other DNA
aatgatgagaaggct

SEQ ID NO: 5553 - DNA, 15 bp, synthetic construct
  source 1..15: mol_type = other DNA
cattcataccttcac

SEQ ID NO: 5554 - DNA, 15 bp, synthetic construct
  source 1..15: mol_type = other DNA
ctgtgttccaggatt

SEQ ID NO: 5555 - DNA, 15 bp, synthetic construct
  source 1..15: mol_type = other DNA
aaagaaaagcaacag

SEQ ID NO: 5556 - DNA, 15 bp, synthetic construct
  source 1..15: mol_type = other DNA
tgaacgtgcattctg

SEQ ID NO: 5557 - DNA, 15 bp, synthetic construct
  source 1..15: mol_type = other DNA
ggcatttctagttat

SEQ ID NO: 5558 - DNA, 15 bp, synthetic construct
  source 1..15: mol_type = other DNA
tttaggcctcttctt

SEQ ID NO: 5559 - DNA, 15 bp, synthetic construct
  source 1..15: mol_type = other DNA
aactagattgatttt

SEQ ID NO: 5560 - DNA, 15 bp, synthetic construct
  source 1..15: mol_type = other DNA
gtattacctaacagt

SEQ ID NO: 5561 - DNA, 15 bp, synthetic construct
  source 1..15: mol_type = other DNA
gcatcttcactgatg

SEQ ID NO: 5562 - DNA, 15 bp, synthetic construct
  source 1..15: mol_type = other DNA
gtgggaaaatgtggt

SEQ ID NO: 5563 - DNA, 15 bp, synthetic construct
  source 1..15: mol_type = other DNA
tcttggtggaatgaa

SEQ ID NO: 5564 - DNA, 15 bp, synthetic construct
  source 1..15: mol_type = other DNA
tgattgtatcagttc

SEQ ID NO: 5565 - DNA, 15 bp, synthetic construct
  source 1..15: mol_type = other DNA
cggtactcaaacaca

SEQ ID NO: 5566 - DNA, 15 bp, synthetic construct
  source 1..15: mol_type = other DNA
atgtcttcataggat

SEQ ID NO: 5567 - DNA, 15 bp, synthetic construct
  source 1..15: mol_type = other DNA
agtcaatcagtgagt

SEQ ID NO: 5568 - DNA, 15 bp, synthetic construct
  source 1..15: mol_type = other DNA
agtgtgtctgtaacc

SEQ ID NO: 5569 - DNA, 15 bp, synthetic construct
  source 1..15: mol_type = other DNA
aacagaggctcctag

SEQ ID NO: 5570 - DNA, 15 bp, synthetic construct
  source 1..15: mol_type = other DNA
ctgtttatcatcttc

SEQ ID NO: 5571 - DNA, 15 bp, synthetic construct
  source 1..15: mol_type = other DNA
ggcagagaattcggg

SEQ ID NO: 5572 - DNA, 15 bp, synthetic construct
  source 1..15: mol_type = other DNA
actcagactaagtaa

SEQ ID NO: 5573 - DNA, 15 bp, synthetic construct
  source 1..15: mol_type = other DNA
atgatactgttggaa

SEQ ID NO: 5574 - DNA, 15 bp, synthetic construct
  source 1..15: mol_type = other DNA
ctgttaatgctttta

SEQ ID NO: 5575 - DNA, 15 bp, synthetic construct
  source 1..15: mol_type = other DNA
tggtcccattgaaag

SEQ ID NO: 5576 - DNA, 15 bp, synthetic construct
  source 1..15: mol_type = other DNA
tttaggacagtttgc

SEQ ID NO: 5577 - DNA, 15 bp, synthetic construct
  source 1..15: mol_type = other DNA
ttcttcacatatacc

SEQ ID NO: 5578 - DNA, 15 bp, synthetic construct
  source 1..15: mol_type = other DNA
ctgcccttgtttttg

SEQ ID NO: 5579 - DNA, 15 bp, synthetic construct
  source 1..15: mol_type = other DNA
tccccaatttccata

SEQ ID NO: 5580 - DNA, 15 bp, synthetic construct
  source 1..15: mol_type = other DNA
cgtcaccgatgtcaa

SEQ ID NO: 5581 - DNA, 15 bp, synthetic construct
  source 1..15: mol_type = other DNA
acagtccctttatag

SEQ ID NO: 5582 - DNA, 15 bp, synthetic construct
  source 1..15: mol_type = other DNA
gtatagcctggatca

SEQ ID NO: 5583 - DNA, 15 bp, synthetic construct
  source 1..15: mol_type = other DNA
caaaggattcaatga

SEQ ID NO: 5584 - DNA, 15 bp, synthetic construct
  source 1..15: mol_type = other DNA
ccatactggccaggt

SEQ ID NO: 5585 - DNA, 15 bp, synthetic construct
  source 1..15: mol_type = other DNA
tacagaagccaccat

SEQ ID NO: 5586 - DNA, 15 bp, synthetic construct
  source 1..15: mol_type = other DNA
acagtgtcagaggac

SEQ ID NO: 5587 - DNA, 15 bp, synthetic construct
  source 1..15: mol_type = other DNA
gagatctatctctgt

SEQ ID NO: 5588 - DNA, 15 bp, synthetic construct
  source 1..15: mol_type = other DNA
taaaagagaatttgg

SEQ ID NO: 5589 - DNA, 15 bp, synthetic construct
  source 1..15: mol_type = other DNA
gattacgccggacag

SEQ ID NO: 5590 - DNA, 15 bp, synthetic construct
  source 1..15: mol_type = other DNA
gctaaggatgctgga

SEQ ID NO: 5591 - DNA, 15 bp, synthetic construct
  source 1..15: mol_type = other DNA
atgacattcacggtg

SEQ ID NO: 5592 - DNA, 15 bp, synthetic construct
  source 1..15: mol_type = other DNA
gaggtgaaaactacg

SEQ ID NO: 5593 - DNA, 15 bp, synthetic construct
  source 1..15: mol_type = other DNA
ataaataccagaatc

SEQ ID NO: 5594 - DNA, 15 bp, synthetic construct
  source 1..15: mol_type = other DNA
caacagggattatca

SEQ ID NO: 5595 - DNA, 15 bp, synthetic construct
  source 1..15: mol_type = other DNA
taaaatggcttcagg

SEQ ID NO: 5596 - DNA, 15 bp, synthetic construct
  source 1..15: mol_type = other DNA
tcacggtggacgtta

SEQ ID NO: 5597 - DNA, 15 bp, synthetic construct
  source 1..15: mol_type = other DNA
caaagagtggtggat

SEQ ID NO: 5598 - DNA, 15 bp, synthetic construct
  source 1..15: mol_type = other DNA
ccaccgattctgatt

SEQ ID NO: 5599 - DNA, 15 bp, synthetic construct
  source 1..15: mol_type = other DNA
tctggtatgagattc

SEQ ID NO: 5600 - DNA, 15 bp, synthetic construct
  source 1..15: mol_type = other DNA
catagctcctctgga

SEQ ID NO: 5601 - DNA, 15 bp, synthetic construct
  source 1..15: mol_type = other DNA
gctcagcttatatgc

SEQ ID NO: 5602 - DNA, 15 bp, synthetic construct
  source 1..15: mol_type = other DNA
ttatcgttccgatca

SEQ ID NO: 5603 - DNA, 15 bp, synthetic construct
  source 1..15: mol_type = other DNA
gtttttcaaacacag

SEQ ID NO: 5604 - DNA, 15 bp, synthetic construct
  source 1..15: mol_type = other DNA
tcgctatgtcactgc

SEQ ID NO: 5605 - DNA, 15 bp, synthetic construct
  source 1..15: mol_type = other DNA
acttccccgtttctg

SEQ ID NO: 5606 - DNA, 15 bp, synthetic construct
  source 1..15: mol_type = other DNA
gttctgtcaaccact

SEQ ID NO: 5607 - DNA, 15 bp, synthetic construct
  source 1..15: mol_type = other DNA
ctctgtcacttctac

SEQ ID NO: 5608 - DNA, 15 bp, synthetic construct
  source 1..15: mol_type = other DNA
gcaaagaaagtcacc

SEQ ID NO: 5609 - DNA, 15 bp, synthetic construct
  source 1..15: mol_type = other DNA
cagagtagacatcct

SEQ ID NO: 5610 - DNA, 15 bp, synthetic construct
  source 1..15: mol_type = other DNA
aaatgctacagatgc

SEQ ID NO: 5611 - DNA, 15 bp, synthetic construct
  source 1..15: mol_type = other DNA
ggagtaaatcaactg

SEQ ID NO: 5612 - DNA, 15 bp, synthetic construct
  source 1..15: mol_type = other DNA
gactatgaagaaaca

SEQ ID NO: 5613 - DNA, 15 bp, synthetic construct
  source 1..15: mol_type = other DNA
cacttggacggtaaa

SEQ ID NO: 5614 - DNA, 15 bp, synthetic construct
  source 1..15: mol_type = other DNA
atgcaggcagaatat

SEQ ID NO: 5615 - DNA, 15 bp, synthetic construct
  source 1..15: mol_type = other DNA
aggctgattcactaa

SEQ ID NO: 5616 - DNA, 15 bp, synthetic construct
  source 1..15: mol_type = other DNA
tcagtggtgtatgaa

SEQ ID NO: 5617 - DNA, 15 bp, synthetic construct
  source 1..15: mol_type = other DNA
ccagaatgtggatta

SEQ ID NO: 5618 - DNA, 15 bp, synthetic construct
  source 1..15: mol_type = other DNA
tttaatggtaaaagc

SEQ ID NO: 5619 - DNA, 15 bp, synthetic construct
  source 1..15: mol_type = other DNA
atttcactcattggt

SEQ ID NO: 5620 - DNA, 15 bp, synthetic construct
  source 1..15: mol_type = other DNA
ctgcttaatttcaga

SEQ ID NO: 5621 - DNA, 15 bp, synthetic construct
  source 1..15: mol_type = other DNA
aaaatgccactgaag

SEQ ID NO: 5622 - DNA, 15 bp, synthetic construct
  source 1..15: mol_type = other DNA
gagatcaagatgtgc

SEQ ID NO: 5623 - DNA, 15 bp, synthetic construct
  source 1..15: mol_type = other DNA
acaatccttgcaaag

SEQ ID NO: 5624 - DNA, 15 bp, synthetic construct
  source 1..15: mol_type = other DNA
gtcttgatcctgcaa

SEQ ID NO: 5625 - DNA, 15 bp, synthetic construct
  source 1..15: mol_type = other DNA
acaatccttgcaaag

SEQ ID NO: 5626 - DNA, 15 bp, synthetic construct
  source 1..15: mol_type = other DNA
gtcttgatcctgcaa

SEQ ID NO: 5627 - DNA, 15 bp, synthetic construct
  source 1..15: mol_type = other DNA
tgatccagtttctca

SEQ ID NO: 5628 - DNA, 15 bp, synthetic construct
  source 1..15: mol_type = other DNA
acaaatgaccatcgt

SEQ ID NO: 5629 - DNA, 15 bp, synthetic construct
  source 1..15: mol_type = other DNA
gcagagtgtagatta

SEQ ID NO: 5630 - DNA, 15 bp, synthetic construct
  source 1..15: mol_type = other DNA
tttcaatatacatga

SEQ ID NO: 5631 - DNA, 15 bp, synthetic construct
  source 1..15: mol_type = other DNA
gtcagaacgttatct

SEQ ID NO: 5632 - DNA, 15 bp, synthetic construct
  source 1..15: mol_type = other DNA
aataaactacagagt

SEQ ID NO: 5633 - DNA, 15 bp, synthetic construct
  source 1..15: mol_type = other DNA
gacttgtgcccaaaa

SEQ ID NO: 5634 - DNA, 15 bp, synthetic construct
  source 1..15: mol_type = other DNA
agactccatattgaa

SEQ ID NO: 5635 - DNA, 15 bp, synthetic construct
  source 1..15: mol_type = other DNA
accagtgatgtcaaa

SEQ ID NO: 5636 - DNA, 15 bp, synthetic construct
  source 1..15: mol_type = other DNA
ctgatttgctgtttt

SEQ ID NO: 5637 - DNA, 15 bp, synthetic construct
  source 1..15: mol_type = other DNA
ttctcaaacgttatc

SEQ ID NO: 5638 - DNA, 15 bp, synthetic construct
  source 1..15: mol_type = other DNA
tcgaagacgggaatg

SEQ ID NO: 5639 - DNA, 15 bp, synthetic construct
  source 1..15: mol_type = other DNA
tcttggacgaaacca

SEQ ID NO: 5640 - DNA, 15 bp, synthetic construct
  source 1..15: mol_type = other DNA
ttgcaagagtcattg

SEQ ID NO: 5641 - DNA, 15 bp, synthetic construct
  source 1..15: mol_type = other DNA
tgcagaaactgaggt

SEQ ID NO: 5642 - DNA, 15 bp, synthetic construct
  source 1..15: mol_type = other DNA
tgttggaatgaagat

SEQ ID NO: 5643 - DNA, 15 bp, synthetic construct
  source 1..15: mol_type = other DNA
gttaatgggaacaag

SEQ ID NO: 5644 - DNA, 15 bp, synthetic construct
  source 1..15: mol_type = other DNA
gtgtgattttaattg

SEQ ID NO: 5645 - DNA, 15 bp, synthetic construct
  source 1..15: mol_type = other DNA
agaaaagcataagca

SEQ ID NO: 5646 - DNA, 15 bp, synthetic construct
  source 1..15: mol_type = other DNA
agaggttgaggatgt

SEQ ID NO: 5647 - DNA, 15 bp, synthetic construct
  source 1..15: mol_type = other DNA
aatgcctcgatctgg

SEQ ID NO: 5648 - DNA, 15 bp, synthetic construct
  source 1..15: mol_type = other DNA
tgctttacgcttttc

SEQ ID NO: 5649 - DNA, 15 bp, synthetic construct
  source 1..15: mol_type = other DNA
gagcaataaaaacat

SEQ ID NO: 5650 - DNA, 15 bp, synthetic construct
  source 1..15: mol_type = other DNA
tcttctacttgctat

SEQ ID NO: 5651 - DNA, 15 bp, synthetic construct
  source 1..15: mol_type = other DNA
taccaatgaaccaac

SEQ ID NO: 5652 - DNA, 15 bp, synthetic construct
  source 1..15: mol_type = other DNA
gtggagcagttagga

SEQ ID NO: 5653 - DNA, 15 bp, synthetic construct
  source 1..15: mol_type = other DNA
cttctcaaagtccaa

SEQ ID NO: 5654 - DNA, 15 bp, synthetic construct
  source 1..15: mol_type = other DNA
actgtcgttgtgaaa

SEQ ID NO: 5655 - DNA, 15 bp, synthetic construct
  source 1..15: mol_type = other DNA
aggtgggttgtcatt

SEQ ID NO: 5656 - DNA, 15 bp, synthetic construct
  source 1..15: mol_type = other DNA
atccaggttgaagcc

SEQ ID NO: 5657 - DNA, 15 bp, synthetic construct
  source 1..15: mol_type = other DNA
tgtctgtgtctgtaa

SEQ ID NO: 5658 - DNA, 15 bp, synthetic construct
  source 1..15: mol_type = other DNA
acaacagacaaatac

SEQ ID NO: 5659 - DNA, 15 bp, synthetic construct
  source 1..15: mol_type = other DNA
aggtcatagacggta

SEQ ID NO: 5660 - DNA, 15 bp, synthetic construct
  source 1..15: mol_type = other DNA
ctcacataccgcagt

SEQ ID NO: 5661 - DNA, 15 bp, synthetic construct
  source 1..15: mol_type = other DNA
ctgaataccagtcgg

SEQ ID NO: 5662 - DNA, 15 bp, synthetic construct
  source 1..15: mol_type = other DNA
agtctgagaatcaca

SEQ ID NO: 5663 - DNA, 15 bp, synthetic construct
  source 1..15: mol_type = other DNA
atgttgatatataat

SEQ ID NO: 5664 - DNA, 15 bp, synthetic construct
  source 1..15: mol_type = other DNA
ttcccagagatctag

SEQ ID NO: 5665 - DNA, 15 bp, synthetic construct
  source 1..15: mol_type = other DNA
agaaacagtggttat

SEQ ID NO: 5666 - DNA, 15 bp, synthetic construct
  source 1..15: mol_type = other DNA
tgccgtttgcgattg

SEQ ID NO: 5667 - DNA, 15 bp, synthetic construct
  source 1..15: mol_type = other DNA
ttttctgacgtactc

SEQ ID NO: 5668 - DNA, 15 bp, synthetic construct
  source 1..15: mol_type = other DNA
aagtgacagaaaagc

SEQ ID NO: 5669 - DNA, 15 bp, synthetic construct
  source 1..15: mol_type = other DNA
gactttcaccaagac

SEQ ID NO: 5670 - DNA, 15 bp, synthetic construct
  source 1..15: mol_type = other DNA
tgtttacagagcaga

SEQ ID NO: 5671 - DNA, 15 bp, synthetic construct
  source 1..15: mol_type = other DNA
aataagcaggaatgg

SEQ ID NO: 5672 - DNA, 15 bp, synthetic construct
  source 1..15: mol_type = other DNA
gtaaggagtataaag

SEQ ID NO: 5673 - DNA, 15 bp, synthetic construct
  source 1..15: mol_type = other DNA
gattgtagccgaaag

SEQ ID NO: 5674 - DNA, 15 bp, synthetic construct
  source 1..15: mol_type = other DNA
acaggccaatgaatg

SEQ ID NO: 5675 - DNA, 15 bp, synthetic construct
  source 1..15: mol_type = other DNA
tgtcactgctgttat

SEQ ID NO: 5676 - DNA, 15 bp, synthetic construct
  source 1..15: mol_type = other DNA
acataggaaccaacg

SEQ ID NO: 5677 - DNA, 15 bp, synthetic construct
  source 1..15: mol_type = other DNA
ggtgaatagcaaaca

SEQ ID NO: 5678 - DNA, 15 bp, synthetic construct
  source 1..15: mol_type = other DNA
tagtgaaagcacttg

SEQ ID NO: 5679 - DNA, 15 bp, synthetic construct
  source 1..15: mol_type = other DNA
tgtatccagcacctg

SEQ ID NO: 5680 - DNA, 15 bp, synthetic construct
  source 1..15: mol_type = other DNA
gatgggtgtttacat

SEQ ID NO: 5681 - DNA, 15 bp, synthetic construct
  source 1..15: mol_type = other DNA
ttacttcccacgctg

SEQ ID NO: 5682 - DNA, 15 bp, synthetic construct
  source 1..15: mol_type = other DNA
cgattctgatttctt

SEQ ID NO: 5683 - DNA, 15 bp, synthetic construct
  source 1..15: mol_type = other DNA
tgcggagccgtccag

SEQ ID NO: 5684 - DNA, 15 bp, synthetic construct
  source 1..15: mol_type = other DNA
agcacttagacattc

SEQ ID NO: 5685 - DNA, 15 bp, synthetic construct
  source 1..15: mol_type = other DNA
cctcggcaacgtgtg

SEQ ID NO: 5686 - DNA, 15 bp, synthetic construct
  source 1..15: mol_type = other DNA
gcctacctcctccgt

SEQ ID NO: 5687 - DNA, 15 bp, synthetic construct
  source 1..15: mol_type = other DNA
gtgcttctagaacgt

SEQ ID NO: 5688 - DNA, 15 bp, synthetic construct
  source 1..15: mol_type = other DNA
ctcaccagcagccta

SEQ ID NO: 5689 - DNA, 15 bp, synthetic construct
  source 1..15: mol_type = other DNA
atcccgttcctcatc

SEQ ID NO: 5690 - DNA, 15 bp, synthetic construct
  source 1..15: mol_type = other DNA
ggcgaactccaggta

SEQ ID NO: 5691 - DNA, 15 bp, synthetic construct
  source 1..15: mol_type = other DNA
tggagtagcccatcc

SEQ ID NO: 5692 - DNA, 15 bp, synthetic construct
  source 1..15: mol_type = other DNA
caccagaaacagaca

SEQ ID NO: 5693 - DNA, 15 bp, synthetic construct
  source 1..15: mol_type = other DNA
gtgggactgtattac

SEQ ID NO: 5694 - DNA, 15 bp, synthetic construct
  source 1..15: mol_type = other DNA
ggagttgaataagta

SEQ ID NO: 5695 - DNA, 15 bp, synthetic construct
  source 1..15: mol_type = other DNA
aggcctctggaacgt

SEQ ID NO: 5696 - DNA, 15 bp, synthetic construct
  source 1..15: mol_type = other DNA
ttcgtgctgtcattt

SEQ ID NO: 5697 - DNA, 15 bp, synthetic construct
  source 1..15: mol_type = other DNA
ctggtaccgagagac

SEQ ID NO: 5698 - DNA, 15 bp, synthetic construct
  source 1..15: mol_type = other DNA
gcacatgtacaggac

SEQ ID NO: 5699 - DNA, 15 bp, synthetic construct
  source 1..15: mol_type = other DNA
ccccgcccccatatg

SEQ ID NO: 5700 - DNA, 15 bp, synthetic construct
  source 1..15: mol_type = other DNA
ctgggttttagagtg

SEQ ID NO: 5701 - DNA, 15 bp, synthetic construct
  source 1..15: mol_type = other DNA
ccgcaggccgtgtac

SEQ ID NO: 5702 - DNA, 15 bp, synthetic construct
  source 1..15: mol_type = other DNA
ttgggcgtgaagagg

SEQ ID NO: 5703 - DNA, 15 bp, synthetic construct
  source 1..15: mol_type = other DNA
tgaccaccccaatag

SEQ ID NO: 5704 - DNA, 15 bp, synthetic construct
  source 1..15: mol_type = other DNA
cctgggactggtcga

SEQ ID NO: 5705 - DNA, 15 bp, synthetic construct
  source 1..15: mol_type = other DNA
ctgggacctcatcgc

SEQ ID NO: 5706 - DNA, 15 bp, synthetic construct
  source 1..15: mol_type = other DNA
ctgagagggaaactg

SEQ ID NO: 5707 - DNA, 15 bp, synthetic construct
  source 1..15: mol_type = other DNA
atcatcaacggcttc

SEQ ID NO: 5708 - DNA, 15 bp, synthetic construct
  source 1..15: mol_type = other DNA
acgtgctgaagcagt

SEQ ID NO: 5709 - DNA, 15 bp, synthetic construct
  source 1..15: mol_type = other DNA
atcatcaacggcttc

SEQ ID NO: 5710 - DNA, 15 bp, synthetic construct
  source 1..15: mol_type = other DNA
ttctcctgggtcacg

SEQ ID NO: 5711 - DNA, 15 bp, synthetic construct
  source 1..15: mol_type = other DNA
acgggttcgacctgc

SEQ ID NO: 5712 - DNA, 15 bp, synthetic construct
  source 1..15: mol_type = other DNA
ttctcctgggtcacg

SEQ ID NO: 5713 - DNA, 15 bp, synthetic construct
  source 1..15: mol_type = other DNA
agacctgcgacatca

SEQ ID NO: 5714 - DNA, 15 bp, synthetic construct
  source 1..15: mol_type = other DNA
ctacctctgagagga

SEQ ID NO: 5715 - DNA, 15 bp, synthetic construct
  source 1..15: mol_type = other DNA
ggtgactgtgtgtca

SEQ ID NO: 5716 - DNA, 15 bp, synthetic construct
  source 1..15: mol_type = other DNA
cctcggaagtgaaat

SEQ ID NO: 5717 - DNA, 15 bp, synthetic construct
  source 1..15: mol_type = other DNA
ggtgctcacaggtac

SEQ ID NO: 5718 - DNA, 15 bp, synthetic construct
  source 1..15: mol_type = other DNA
tcccgactgcacacg

SEQ ID NO: 5719 - DNA, 15 bp, synthetic construct
  source 1..15: mol_type = other DNA
acagctctgtccctg

SEQ ID NO: 5720 - DNA, 15 bp, synthetic construct
  source 1..15: mol_type = other DNA
gagctgctcacatgc

SEQ ID NO: 5721 - DNA, 15 bp, synthetic construct
  source 1..15: mol_type = other DNA
atctgttcgggtagc

SEQ ID NO: 5722 - DNA, 15 bp, synthetic construct
  source 1..15: mol_type = other DNA
attagaggcacctgt

SEQ ID NO: 5723 - DNA, 15 bp, synthetic construct
  source 1..15: mol_type = other DNA
ttcaataaggacatc

SEQ ID NO: 5724 - DNA, 15 bp, synthetic construct
  source 1..15: mol_type = other DNA
ctctaccacgaagaa

SEQ ID NO: 5725 - DNA, 15 bp, synthetic construct
  source 1..15: mol_type = other DNA
gtcacaccatcccag

SEQ ID NO: 5726 - DNA, 15 bp, synthetic construct
  source 1..15: mol_type = other DNA
tgagtgtcctccttt

SEQ ID NO: 5727 - DNA, 15 bp, synthetic construct
  source 1..15: mol_type = other DNA
aatttcccaaatccc

SEQ ID NO: 5728 - DNA, 15 bp, synthetic construct
  source 1..15: mol_type = other DNA
acccagttcgggtag

SEQ ID NO: 5729 - DNA, 15 bp, synthetic construct
  source 1..15: mol_type = other DNA
aatgggaagtaatga

SEQ ID NO: 5730 - DNA, 15 bp, synthetic construct
  source 1..15: mol_type = other DNA
ctgacaccagtgtat

SEQ ID NO: 5731 - DNA, 15 bp, synthetic construct
  source 1..15: mol_type = other DNA
gatgttttggaagtt

SEQ ID NO: 5732 - DNA, 15 bp, synthetic construct
  source 1..15: mol_type = other DNA
tgctatttctgtaaa

SEQ ID NO: 5733 - DNA, 15 bp, synthetic construct
  source 1..15: mol_type = other DNA
ctttacctgctacaa

SEQ ID NO: 5734 - DNA, 15 bp, synthetic construct
  source 1..15: mol_type = other DNA
gcattaaagagaagg

SEQ ID NO: 5735 - DNA, 15 bp, synthetic construct
  source 1..15: mol_type = other DNA
gaatcagtcaccatt

SEQ ID NO: 5736 - DNA, 15 bp, synthetic construct
  source 1..15: mol_type = other DNA
ccaaaacttttcact

SEQ ID NO: 5737 - DNA, 15 bp, synthetic construct
  source 1..15: mol_type = other DNA
tctatattttgctct

SEQ ID NO: 5738 - DNA, 15 bp, synthetic construct
  source 1..15: mol_type = other DNA
gaagacacctggatt

SEQ ID NO: 5739 - DNA, 15 bp, synthetic construct
  source 1..15: mol_type = other DNA
aggaatgatgatgtc

SEQ ID NO: 5740 - DNA, 15 bp, synthetic construct
  source 1..15: mol_type = other DNA
ggaattctgagaaag

SEQ ID NO: 5741 - DNA, 15 bp, synthetic construct
  source 1..15: mol_type = other DNA
aggaatagcgtgttt

SEQ ID NO: 5742 - DNA, 15 bp, synthetic construct
  source 1..15: mol_type = other DNA
ccatacaagacaata

SEQ ID NO: 5743 - DNA, 15 bp, synthetic construct
  source 1..15: mol_type = other DNA
tacatgagtatctgt

SEQ ID NO: 5744 - DNA, 15 bp, synthetic construct
  source 1..15: mol_type = other DNA
tcacttgaaccatgt

SEQ ID NO: 5745 - DNA, 15 bp, synthetic construct
  source 1..15: mol_type = other DNA
ctaatcatcatgctg

SEQ ID NO: 5746 - DNA, 15 bp, synthetic construct
  source 1..15: mol_type = other DNA
actggtcacacttga

SEQ ID NO: 5747 - DNA, 15 bp, synthetic construct
  source 1..15: mol_type = other DNA
tgttgattcttttgg

SEQ ID NO: 5748 - DNA, 15 bp, synthetic construct
  source 1..15: mol_type = other DNA
tgtggagatctcaag

SEQ ID NO: 5749 - DNA, 15 bp, synthetic construct
  source 1..15: mol_type = other DNA
caatgaggaatgctg

SEQ ID NO: 5750 - DNA, 15 bp, synthetic construct
  source 1..15: mol_type = other DNA
gacctgcttgtacag

SEQ ID NO: 5751 - DNA, 15 bp, synthetic construct
  source 1..15: mol_type = other DNA
gtgaaaccaccacaa

SEQ ID NO: 5752 - DNA, 15 bp, synthetic construct
  source 1..15: mol_type = other DNA
agagtccttggatgg

SEQ ID NO: 5753 - DNA, 15 bp, synthetic construct
  source 1..15: mol_type = other DNA
ggcaatgtatgatat

SEQ ID NO: 5754 - DNA, 15 bp, synthetic construct
  source 1..15: mol_type = other DNA
tgtggagtaatgggt

SEQ ID NO: 5755 - DNA, 15 bp, synthetic construct
  source 1..15: mol_type = other DNA
agtacccaggacaga

SEQ ID NO: 5756 - DNA, 15 bp, synthetic construct
  source 1..15: mol_type = other DNA
aatgcatccaattcc

SEQ ID NO: 5757 - DNA, 15 bp, synthetic construct
  source 1..15: mol_type = other DNA
aacagggacctatat

SEQ ID NO: 5758 - DNA, 15 bp, synthetic construct
  source 1..15: mol_type = other DNA
agtggtaataatgag

SEQ ID NO: 5759 - DNA, 15 bp, synthetic construct
  source 1..15: mol_type = other DNA
gtccatagggttttt

SEQ ID NO: 5760 - DNA, 15 bp, synthetic construct
  source 1..15: mol_type = other DNA
atagaagcctgagag

SEQ ID NO: 5761 - DNA, 15 bp, synthetic construct
  source 1..15: mol_type = other DNA
atcttcatcaggcag

SEQ ID NO: 5762 - DNA, 15 bp, synthetic construct
  source 1..15: mol_type = other DNA
gtttagattctgcta

SEQ ID NO: 5763 - DNA, 15 bp, synthetic construct
  source 1..15: mol_type = other DNA
gaaatgaaacaaagt

SEQ ID NO: 5764 - DNA, 15 bp, synthetic construct
  source 1..15: mol_type = other DNA
ttttgtgtcagacag

SEQ ID NO: 5765 - DNA, 15 bp, synthetic construct
  source 1..15: mol_type = other DNA
tgagcctaaacaaaa

SEQ ID NO: 5766 - DNA, 15 bp, synthetic construct
  source 1..15: mol_type = other DNA
tcgcccttcattttt

SEQ ID NO: 5767 - DNA, 15 bp, synthetic construct
  source 1..15: mol_type = other DNA
gcaaaaaggtgagag

SEQ ID NO: 5768 - DNA, 15 bp, synthetic construct
  source 1..15: mol_type = other DNA
agatcgcccatcagg

SEQ ID NO: 5769 - DNA, 15 bp, synthetic construct
  source 1..15: mol_type = other DNA
acgagctgaagcctt

SEQ ID NO: 5770 - DNA, 15 bp, synthetic construct
  source 1..15: mol_type = other DNA
tttcgttctagttta

SEQ ID NO: 5771 - DNA, 15 bp, synthetic construct
  source 1..15: mol_type = other DNA
ttaaatctgatagtt

SEQ ID NO: 5772 - DNA, 15 bp, synthetic construct
  source 1..15: mol_type = other DNA
agtgtctactttact

SEQ ID NO: 5773 - DNA, 15 bp, synthetic construct
  source 1..15: mol_type = other DNA
tgacaaaaggacaga

SEQ ID NO: 5774 - DNA, 15 bp, synthetic construct
  source 1..15: mol_type = other DNA
tttttcaacgcacca

SEQ ID NO: 5775 - DNA, 15 bp, synthetic construct
  source 1..15: mol_type = other DNA
caagttatttgttgg

SEQ ID NO: 5776 - DNA, 15 bp, synthetic construct
  source 1..15: mol_type = other DNA
atttgtcctctctat

SEQ ID NO: 5777 - DNA, 15 bp, synthetic construct
  source 1..15: mol_type = other DNA
gatgatgttcagaaa

SEQ ID NO: 5778 - DNA, 15 bp, synthetic construct
  source 1..15: mol_type = other DNA
tatctatactcctga

SEQ ID NO: 5779 - DNA, 15 bp, synthetic construct
  source 1..15: mol_type = other DNA
agtattatagttgtg

SEQ ID NO: 5780 - DNA, 15 bp, synthetic construct
  source 1..15: mol_type = other DNA
tggtggactcaattt

SEQ ID NO: 5781 - DNA, 15 bp, synthetic construct
  source 1..15: mol_type = other DNA
gaattaccccctgaa

SEQ ID NO: 5782 - DNA, 15 bp, synthetic construct
  source 1..15: mol_type = other DNA
gcttttaaactctaa

SEQ ID NO: 5783 - DNA, 15 bp, synthetic construct
  source 1..15: mol_type = other DNA
gctaaaattagtgat

SEQ ID NO: 5784 - DNA, 15 bp, synthetic construct
  source 1..15: mol_type = other DNA
tattcccaagcttta

SEQ ID NO: 5785 - DNA, 15 bp, synthetic construct
  source 1..15: mol_type = other DNA
ggaaacgacataaaa

SEQ ID NO: 5786 - DNA, 15 bp, synthetic construct
  source 1..15: mol_type = other DNA
aaatccgttgacact

SEQ ID NO: 5787 - DNA, 15 bp, synthetic construct
  source 1..15: mol_type = other DNA
gcagtgattatcgtt

SEQ ID NO: 5788 - DNA, 15 bp, synthetic construct
  source 1..15: mol_type = other DNA
acatgtgaagctgaa

SEQ ID NO: 5789 - DNA, 15 bp, synthetic construct
  source 1..15: mol_type = other DNA
ttcacatgtctactt

SEQ ID NO: 5790 - DNA, 15 bp, synthetic construct
  source 1..15: mol_type = other DNA
actagagtaactgag

SEQ ID NO: 5791 - DNA, 15 bp, synthetic construct
  source 1..15: mol_type = other DNA
ttgtgtttgtttggc

SEQ ID NO: 5792 - DNA, 15 bp, synthetic construct
  source 1..15: mol_type = other DNA
ttttctttttactat

SEQ ID NO: 5793 - DNA, 15 bp, synthetic construct
  source 1..15: mol_type = other DNA
gagggtgacaatgct

SEQ ID NO: 5794 - DNA, 15 bp, synthetic construct
  source 1..15: mol_type = other DNA
taacagtatggatct

SEQ ID NO: 5795 - DNA, 15 bp, synthetic construct
  source 1..15: mol_type = other DNA
acacttttccaccag

SEQ ID NO: 5796 - DNA, 15 bp, synthetic construct
  source 1..15: mol_type = other DNA
ttttggcatgttagg

SEQ ID NO: 5797 - DNA, 15 bp, synthetic construct
  source 1..15: mol_type = other DNA
tacaactatcaacat

SEQ ID NO: 5798 - DNA, 15 bp, synthetic construct
  source 1..15: mol_type = other DNA
atctaacatggcaaa

SEQ ID NO: 5799 - DNA, 15 bp, synthetic construct
  source 1..15: mol_type = other DNA
ccaggttctgtagct

SEQ ID NO: 5800 - DNA, 15 bp, synthetic construct
  source 1..15: mol_type = other DNA
taacaatgtcacaaa

SEQ ID NO: 5801 - DNA, 15 bp, synthetic construct
  source 1..15: mol_type = other DNA
gtaatagtaatgctt

SEQ ID NO: 5802 - DNA, 15 bp, synthetic construct
  source 1..15: mol_type = other DNA
tgagtgagctaggtt

SEQ ID NO: 5803 - DNA, 15 bp, synthetic construct
  source 1..15: mol_type = other DNA
gttttccagtaagct

SEQ ID NO: 5804 - DNA, 15 bp, synthetic construct
  source 1..15: mol_type = other DNA
tgacatcaatattgt

SEQ ID NO: 5805 - DNA, 15 bp, synthetic construct
  source 1..15: mol_type = other DNA
ttctaaatggcaggt

SEQ ID NO: 5806 - DNA, 15 bp, synthetic construct
  source 1..15: mol_type = other DNA
tcaatataatggtgg

SEQ ID NO: 5807 - DNA, 15 bp, synthetic construct
  source 1..15: mol_type = other DNA
tgaaactttcagaca

SEQ ID NO: 5808 - DNA, 15 bp, synthetic construct
  source 1..15: mol_type = other DNA
acagttgtaaaacct

SEQ ID NO: 5809 - DNA, 15 bp, synthetic construct
  source 1..15: mol_type = other DNA
acatgacaatagcaa

SEQ ID NO: 5810 - DNA, 15 bp, synthetic construct
  source 1..15: mol_type = other DNA
gattcatctttttaa

SEQ ID NO: 5811 - DNA, 15 bp, synthetic construct
  source 1..15: mol_type = other DNA
agatgactgacatgt

SEQ ID NO: 5812 - DNA, 15 bp, synthetic construct
  source 1..15: mol_type = other DNA
catcctcattatgtt

SEQ ID NO: 5813 - DNA, 15 bp, synthetic construct
  source 1..15: mol_type = other DNA
atgttcagattccag

SEQ ID NO: 5814 - DNA, 15 bp, synthetic construct
  source 1..15: mol_type = other DNA
gagatgccactctta

SEQ ID NO: 5815 - DNA, 15 bp, synthetic construct
  source 1..15: mol_type = other DNA
agtaacaagtcaaca

SEQ ID NO: 5816 - DNA, 15 bp, synthetic construct
  source 1..15: mol_type = other DNA
aggacatgcaaagaa

SEQ ID NO: 5817 - DNA, 15 bp, synthetic construct
  source 1..15: mol_type = other DNA
gatttgtgtttacaa

SEQ ID NO: 5818 - DNA, 15 bp, synthetic construct
  source 1..15: mol_type = other DNA
tcatcatgctacctc

SEQ ID NO: 5819 - DNA, 15 bp, synthetic construct
  source 1..15: mol_type = other DNA
aatgtgagcactcta

SEQ ID NO: 5820 - DNA, 15 bp, synthetic construct
  source 1..15: mol_type = other DNA
ggccagttgtctcaa

SEQ ID NO: 5821 - DNA, 15 bp, synthetic construct
  source 1..15: mol_type = other DNA
gaaggaacacatcat

SEQ ID NO: 5822 - DNA, 15 bp, synthetic construct
  source 1..15: mol_type = other DNA
acaaaaagtcattaa

SEQ ID NO: 5823 - DNA, 15 bp, synthetic construct
  source 1..15: mol_type = other DNA
gaaaacagtttacat

SEQ ID NO: 5824 - DNA, 15 bp, synthetic construct
  source 1..15: mol_type = other DNA
acaagcatccagaat

SEQ ID NO: 5825 - DNA, 15 bp, synthetic construct
  source 1..15: mol_type = other DNA
catgttttcatgcta

SEQ ID NO: 5826 - DNA, 15 bp, synthetic construct
  source 1..15: mol_type = other DNA
catggcttttgttcg

SEQ ID NO: 5827 - DNA, 15 bp, synthetic construct
  source 1..15: mol_type = other DNA
ttgcttggcagatcc

SEQ ID NO: 5828 - DNA, 15 bp, synthetic construct
  source 1..15: mol_type = other DNA
gaattatccatcaat

SEQ ID NO: 5829 - DNA, 15 bp, synthetic construct
  source 1..15: mol_type = other DNA
ttgcttggcagatcc

SEQ ID NO: 5830 - DNA, 15 bp, synthetic construct
  source 1..15: mol_type = other DNA
gaattatccatcaat

SEQ ID NO: 5831 - DNA, 15 bp, synthetic construct
  source 1..15: mol_type = other DNA
atatgcaacgaggtg

SEQ ID NO: 5832 - DNA, 15 bp, synthetic construct
  source 1..15: mol_type = other DNA
cttgaaaggcaaaat

SEQ ID NO: 5833 - DNA, 15 bp, synthetic construct
  source 1..15: mol_type = other DNA
atctcaatttttctg

SEQ ID NO: 5834 - DNA, 15 bp, synthetic construct
  source 1..15: mol_type = other DNA
ataaacatttaactt

SEQ ID NO: 5835 - DNA, 15 bp, synthetic construct
  source 1..15: mol_type = other DNA
atttggaattgtgaa

SEQ ID NO: 5836 - DNA, 15 bp, synthetic construct
  source 1..15: mol_type = other DNA
gacatgtaggcctca

SEQ ID NO: 5837 - DNA, 15 bp, synthetic construct
  source 1..15: mol_type = other DNA
ttggtaaatggttgt

SEQ ID NO: 5838 - DNA, 15 bp, synthetic construct
  source 1..15: mol_type = other DNA
agtcaaaagaacact

SEQ ID NO: 5839 - DNA, 15 bp, synthetic construct
  source 1..15: mol_type = other DNA
acttttaatgtgttt

SEQ ID NO: 5840 - DNA, 15 bp, synthetic construct
  source 1..15: mol_type = other DNA
ctaggttatcaacaa

SEQ ID NO: 5841 - DNA, 15 bp, synthetic construct
  source 1..15: mol_type = other DNA
cctgtgaagaaagct

SEQ ID NO: 5842 - DNA, 15 bp, synthetic construct
  source 1..15: mol_type = other DNA
gagaaatttactcaa

SEQ ID NO: 5843 - DNA, 15 bp, synthetic construct
  source 1..15: mol_type = other DNA
gagcatggcctcttg

SEQ ID NO: 5844 - DNA, 15 bp, synthetic construct
  source 1..15: mol_type = other DNA
caatcttccagaatt

SEQ ID NO: 5845 - DNA, 15 bp, synthetic construct
  source 1..15: mol_type = other DNA
tccagactctgacaa

SEQ ID NO: 5846 - DNA, 15 bp, synthetic construct
  source 1..15: mol_type = other DNA
taaatttaaagcact

SEQ ID NO: 5847 - DNA, 15 bp, synthetic construct
  source 1..15: mol_type = other DNA
ttccataccttgaaa

SEQ ID NO: 5848 - DNA, 15 bp, synthetic construct
  source 1..15: mol_type = other DNA
agtttcacttggatg

SEQ ID NO: 5849 - DNA, 15 bp, synthetic construct
  source 1..15: mol_type = other DNA
agagctagttgtacc

SEQ ID NO: 5850 - DNA, 15 bp, synthetic construct
  source 1..15: mol_type = other DNA
ctacctaaaagatat

SEQ ID NO: 5851 - DNA, 15 bp, synthetic construct
  source 1..15: mol_type = other DNA
catcaaatatggcat

SEQ ID NO: 5852 - DNA, 15 bp, synthetic construct
  source 1..15: mol_type = other DNA
aaacaagcccacaca

SEQ ID NO: 5853 - DNA, 15 bp, synthetic construct
  source 1..15: mol_type = other DNA
catcaaatatggcat

SEQ ID NO: 5854 - DNA, 15 bp, synthetic construct
  source 1..15: mol_type = other DNA
aaacaagcccacaca

SEQ ID NO: 5855 - DNA, 15 bp, synthetic construct
  source 1..15: mol_type = other DNA
ataaagtgacacaaa

SEQ ID NO: 5856 - DNA, 15 bp, synthetic construct
  source 1..15: mol_type = other DNA
taaaatgagctgacc

SEQ ID NO: 5857 - DNA, 15 bp, synthetic construct
  source 1..15: mol_type = other DNA
caaaattaaaaagtc

SEQ ID NO: 5858 - DNA, 15 bp, synthetic construct
  source 1..15: mol_type = other DNA
agctctatgttttat

SEQ ID NO: 5859 - DNA, 15 bp, synthetic construct
  source 1..15: mol_type = other DNA
gaaacaatgcactga

SEQ ID NO: 5860 - DNA, 15 bp, synthetic construct
  source 1..15: mol_type = other DNA
atcaatagttcaagt

SEQ ID NO: 5861 - DNA, 15 bp, synthetic construct
  source 1..15: mol_type = other DNA
cttaggttaacataa

SEQ ID NO: 5862 - DNA, 15 bp, synthetic construct
  source 1..15: mol_type = other DNA
caaatagctacaaat

SEQ ID NO: 5863 - DNA, 15 bp, synthetic construct
  source 1..15: mol_type = other DNA
gtgaaattctccttt

SEQ ID NO: 5864 - DNA, 15 bp, synthetic construct
  source 1..15: mol_type = other DNA
tggatgctgaataaa

SEQ ID NO: 5865 - DNA, 15 bp, synthetic construct
  source 1..15: mol_type = other DNA
tttcccctctcccat

SEQ ID NO: 5866 - DNA, 15 bp, synthetic construct
  source 1..15: mol_type = other DNA
agtctctatctgcct

SEQ ID NO: 5867 - DNA, 15 bp, synthetic construct
  source 1..15: mol_type = other DNA
tacaagaagaagata

SEQ ID NO: 5868 - DNA, 15 bp, synthetic construct
  source 1..15: mol_type = other DNA
gaatttcttcatcta

SEQ ID NO: 5869 - DNA, 15 bp, synthetic construct
  source 1..15: mol_type = other DNA
atgtgtgtttatcct

SEQ ID NO: 5870 - DNA, 15 bp, synthetic construct
  source 1..15: mol_type = other DNA
aagtgctgctgccat

SEQ ID NO: 5871 - DNA, 15 bp, synthetic construct
  source 1..15: mol_type = other DNA
ggatttaagctgaat

SEQ ID NO: 5872 - DNA, 15 bp, synthetic construct
  source 1..15: mol_type = other DNA
ccttgttccgcatag

SEQ ID NO: 5873 - DNA, 15 bp, synthetic construct
  source 1..15: mol_type = other DNA
gctatgggcacagac

SEQ ID NO: 5874 - DNA, 15 bp, synthetic construct
  source 1..15: mol_type = other DNA
agagcatttatcaaa

SEQ ID NO: 5875 - DNA, 15 bp, synthetic construct
  source 1..15: mol_type = other DNA
ctagcctcagaatgt

SEQ ID NO: 5876 - DNA, 15 bp, synthetic construct
  source 1..15: mol_type = other DNA
gctcgtctgtgttgg

SEQ ID NO: 5877 - DNA, 15 bp, synthetic construct
  source 1..15: mol_type = other DNA
tttactccatgatcc

SEQ ID NO: 5878 - DNA, 15 bp, synthetic construct
  source 1..15: mol_type = other DNA
cccttcacttctgac

SEQ ID NO: 5879 - DNA, 15 bp, synthetic construct
  source 1..15: mol_type = other DNA
ttatccgctaaacat

SEQ ID NO: 5880 - DNA, 15 bp, synthetic construct
  source 1..15: mol_type = other DNA
cagtgaaaacagcat

SEQ ID NO: 5881 - DNA, 15 bp, synthetic construct
  source 1..15: mol_type = other DNA
acatatccagttgtt

SEQ ID NO: 5882 - DNA, 15 bp, synthetic construct
  source 1..15: mol_type = other DNA
tttccgtgacttccg

SEQ ID NO: 5883 - DNA, 15 bp, synthetic construct
  source 1..15: mol_type = other DNA
cagtgaagaagaagt

SEQ ID NO: 5884 - DNA, 15 bp, synthetic construct
  source 1..15: mol_type = other DNA
tgcttatgtaacctt

SEQ ID NO: 5885 - DNA, 15 bp, synthetic construct
  source 1..15: mol_type = other DNA
ttaaagtttttggtt

SEQ ID NO: 5886 - DNA, 15 bp, synthetic construct
  source 1..15: mol_type = other DNA
agtaaaaacttttgg

SEQ ID NO: 5887 - DNA, 15 bp, synthetic construct
  source 1..15: mol_type = other DNA
agatgatggctaacg

SEQ ID NO: 5888 - DNA, 15 bp, synthetic construct
  source 1..15: mol_type = other DNA
gcagtgaggtaattg

SEQ ID NO: 5889 - DNA, 15 bp, synthetic construct
  source 1..15: mol_type = other DNA
gctagcacaaatgct

SEQ ID NO: 5890 - DNA, 15 bp, synthetic construct
  source 1..15: mol_type = other DNA
cgtaatacgctgcga

SEQ ID NO: 5891 - DNA, 15 bp, synthetic construct
  source 1..15: mol_type = other DNA
ggagtcaacgtattt

SEQ ID NO: 5892 - DNA, 15 bp, synthetic construct
  source 1..15: mol_type = other DNA
aatctcatttctgtt

SEQ ID NO: 5893 - DNA, 15 bp, synthetic construct
  source 1..15: mol_type = other DNA
gattaaaagcaataa

SEQ ID NO: 5894 - DNA, 15 bp, synthetic construct
  source 1..15: mol_type = other DNA
cagcaaatagcgatg

SEQ ID NO: 5895 - DNA, 15 bp, synthetic construct
  source 1..15: mol_type = other DNA
atgaaagtgttgacg

SEQ ID NO: 5896 - DNA, 15 bp, synthetic construct
  source 1..15: mol_type = other DNA
cgttagagcaatttt

SEQ ID NO: 5897 - DNA, 15 bp, synthetic construct
  source 1..15: mol_type = other DNA
taaagagtcagacat

SEQ ID NO: 5898 - DNA, 15 bp, synthetic construct
  source 1..15: mol_type = other DNA
aagtttttctgcctt

SEQ ID NO: 5899 - DNA, 15 bp, synthetic construct
  source 1..15: mol_type = other DNA
gaaacccaatgatat

SEQ ID NO: 5900 - DNA, 15 bp, synthetic construct
  source 1..15: mol_type = other DNA
ccacaattgtctttt

SEQ ID NO: 5901 - DNA, 15 bp, synthetic construct
  source 1..15: mol_type = other DNA
caatcactagacaaa

SEQ ID NO: 5902 - DNA, 15 bp, synthetic construct
  source 1..15: mol_type = other DNA
atcccaatgtgtgct

SEQ ID NO: 5903 - DNA, 15 bp, synthetic construct
  source 1..15: mol_type = other DNA
ggagtggaggttaca

SEQ ID NO: 5904 - DNA, 15 bp, synthetic construct
  source 1..15: mol_type = other DNA
gaaggctaataatgt

SEQ ID NO: 5905 - DNA, 15 bp, synthetic construct
  source 1..15: mol_type = other DNA
aaggaataggtccaa

SEQ ID NO: 5906 - DNA, 15 bp, synthetic construct
  source 1..15: mol_type = other DNA
tgggctttttgaaat

SEQ ID NO: 5907 - DNA, 15 bp, synthetic construct
  source 1..15: mol_type = other DNA
gaacttaggtcacga

SEQ ID NO: 5908 - DNA, 15 bp, synthetic construct
  source 1..15: mol_type = other DNA
cagattgctgctctc

SEQ ID NO: 5909 - DNA, 15 bp, synthetic construct
  source 1..15: mol_type = other DNA
aaaccttgtcttacc

SEQ ID NO: 5910 - DNA, 15 bp, synthetic construct
  source 1..15: mol_type = other DNA
tatattccctctgga

SEQ ID NO: 5911 - DNA, 15 bp, synthetic construct
  source 1..15: mol_type = other DNA
gcctcagctaaggaa

SEQ ID NO: 5912 - DNA, 15 bp, synthetic construct
  source 1..15: mol_type = other DNA
agtaggaagcttcat

SEQ ID NO: 5913 - DNA, 15 bp, synthetic construct
  source 1..15: mol_type = other DNA
acaatatgctgcaac

SEQ ID NO: 5914 - DNA, 15 bp, synthetic construct
  source 1..15: mol_type = other DNA
tacttaaatgagctg

SEQ ID NO: 5915 - DNA, 15 bp, synthetic construct
  source 1..15: mol_type = other DNA
ttgacatggcagact

SEQ ID NO: 5916 - DNA, 15 bp, synthetic construct
  source 1..15: mol_type = other DNA
ttattctggcagaca

SEQ ID NO: 5917 - DNA, 15 bp, synthetic construct
  source 1..15: mol_type = other DNA
ttcatccaggcttga

SEQ ID NO: 5918 - DNA, 15 bp, synthetic construct
  source 1..15: mol_type = other DNA
agtccattttcagtg

SEQ ID NO: 5919 - DNA, 15 bp, synthetic construct
  source 1..15: mol_type = other DNA
attttaaacaggtta

SEQ ID NO: 5920 - DNA, 15 bp, synthetic construct
  source 1..15: mol_type = other DNA
tacatccgctccaga

SEQ ID NO: 5921 - DNA, 15 bp, synthetic construct
  source 1..15: mol_type = other DNA
tgttaagccaagttc

SEQ ID NO: 5922 - DNA, 15 bp, synthetic construct
  source 1..15: mol_type = other DNA
tactagaattacaga

SEQ ID NO: 5923 - DNA, 15 bp, synthetic construct
  source 1..15: mol_type = other DNA
ctacacccaacttta

SEQ ID NO: 5924 - DNA, 15 bp, synthetic construct
  source 1..15: mol_type = other DNA
tattcaggaagagga

SEQ ID NO: 5925 - DNA, 15 bp, synthetic construct
  source 1..15: mol_type = other DNA
ttatgaaggtgacaa

SEQ ID NO: 5926 - DNA, 15 bp, synthetic construct
  source 1..15: mol_type = other DNA
tttcctactgccgat

SEQ ID NO: 5927 - DNA, 15 bp, synthetic construct
  source 1..15: mol_type = other DNA
tcactggaactggaa

SEQ ID NO: 5928 - DNA, 15 bp, synthetic construct
  source 1..15: mol_type = other DNA
atatctgggttgcca

SEQ ID NO: 5929 - DNA, 15 bp, synthetic construct
  source 1..15: mol_type = other DNA
aatcacattacaaaa

SEQ ID NO: 5930 - DNA, 15 bp, synthetic construct
  source 1..15: mol_type = other DNA
attggaccagtggat

SEQ ID NO: 5931 - DNA, 15 bp, synthetic construct
  source 1..15: mol_type = other DNA
cttcagaaatgctaa

SEQ ID NO: 5932 - DNA, 15 bp, synthetic construct
  source 1..15: mol_type = other DNA
tgatccctaccattt

SEQ ID NO: 5933 - DNA, 15 bp, synthetic construct
  source 1..15: mol_type = other DNA
cctagcttaaagaaa

SEQ ID NO: 5934 - DNA, 15 bp, synthetic construct
  source 1..15: mol_type = other DNA
aactagagcatctca

SEQ ID NO: 5935 - DNA, 15 bp, synthetic construct
  source 1..15: mol_type = other DNA
tagcatttcaggctt

SEQ ID NO: 5936 - DNA, 15 bp, synthetic construct
  source 1..15: mol_type = other DNA
ccaaaaccagagttc

SEQ ID NO: 5937 - DNA, 15 bp, synthetic construct
  source 1..15: mol_type = other DNA
ttccacaatagataa

SEQ ID NO: 5938 - DNA, 15 bp, synthetic construct
  source 1..15: mol_type = other DNA
atcaagaagctgaaa

SEQ ID NO: 5939 - DNA, 15 bp, synthetic construct
  source 1..15: mol_type = other DNA
tccaaaaatacagtg

SEQ ID NO: 5940 - DNA, 15 bp, synthetic construct
  source 1..15: mol_type = other DNA
gtgagagaagagcct

SEQ ID NO: 5941 - DNA, 15 bp, synthetic construct
  source 1..15: mol_type = other DNA
aagctgccatataat

SEQ ID NO: 5942 - DNA, 15 bp, synthetic construct
  source 1..15: mol_type = other DNA
cacatagagtaaaaa

SEQ ID NO: 5943 - DNA, 15 bp, synthetic construct
  source 1..15: mol_type = other DNA
tgtctacatgaccat

SEQ ID NO: 5944 - DNA, 15 bp, synthetic construct
  source 1..15: mol_type = other DNA
gatttggagcagttt

SEQ ID NO: 5945 - DNA, 15 bp, synthetic construct
  source 1..15: mol_type = other DNA
aaaatctaggcagag

SEQ ID NO: 5946 - DNA, 15 bp, synthetic construct
  source 1..15: mol_type = other DNA
aatacttcagctgga

SEQ ID NO: 5947 - DNA, 15 bp, synthetic construct
  source 1..15: mol_type = other DNA
tacctgggtctgtat

SEQ ID NO: 5948 - DNA, 15 bp, synthetic construct
  source 1..15: mol_type = other DNA
ccccatattttactt

SEQ ID NO: 5949 - DNA, 15 bp, synthetic construct
  source 1..15: mol_type = other DNA
aggaacccttgaatt

SEQ ID NO: 5950 - DNA, 15 bp, synthetic construct
  source 1..15: mol_type = other DNA
gtaatcctgtgggaa

SEQ ID NO: 5951 - DNA, 15 bp, synthetic construct
  source 1..15: mol_type = other DNA
ctcctagtcacagtc

SEQ ID NO: 5952 - DNA, 15 bp, synthetic construct
  source 1..15: mol_type = other DNA
caggcaaagaagaag

SEQ ID NO: 5953 - DNA, 15 bp, synthetic construct
  source 1..15: mol_type = other DNA
tggtcgaaaagtcac

SEQ ID NO: 5954 - DNA, 15 bp, synthetic construct
  source 1..15: mol_type = other DNA
gcagaatatcttgcc

SEQ ID NO: 5955 - DNA, 15 bp, synthetic construct
  source 1..15: mol_type = other DNA
attgtgtatagccta

SEQ ID NO: 5956 - DNA, 15 bp, synthetic construct
  source 1..15: mol_type = other DNA
tcccacttgaaaacc

SEQ ID NO: 5957 - DNA, 15 bp, synthetic construct
  source 1..15: mol_type = other DNA
cttgtcttacttcag

SEQ ID NO: 5958 - DNA, 15 bp, synthetic construct
  source 1..15: mol_type = other DNA
tgtcattcttatgct

SEQ ID NO: 5959 - DNA, 15 bp, synthetic construct
  source 1..15: mol_type = other DNA
tttgcattaccatac

SEQ ID NO: 5960 - DNA, 15 bp, synthetic construct
  source 1..15: mol_type = other DNA
atgttaagccaggga

SEQ ID NO: 5961 - DNA, 15 bp, synthetic construct
  source 1..15: mol_type = other DNA
caggtatagtaacgg

SEQ ID NO: 5962 - DNA, 15 bp, synthetic construct
  source 1..15: mol_type = other DNA
cagcatcccatttga

SEQ ID NO: 5963 - DNA, 15 bp, synthetic construct
  source 1..15: mol_type = other DNA
gttatactggcttac

SEQ ID NO: 5964 - DNA, 15 bp, synthetic construct
  source 1..15: mol_type = other DNA
cagaaggcacctaga

SEQ ID NO: 5965 - DNA, 15 bp, synthetic construct
  source 1..15: mol_type = other DNA
aatgtttttgcatgt

SEQ ID NO: 5966 - DNA, 15 bp, synthetic construct
  source 1..15: mol_type = other DNA
gaaggaatttctaat

SEQ ID NO: 5967 - DNA, 15 bp, synthetic construct
  source 1..15: mol_type = other DNA
aatggtatttttaca

SEQ ID NO: 5968 - DNA, 15 bp, synthetic construct
  source 1..15: mol_type = other DNA
agatacacaacaact

SEQ ID NO: 5969 - DNA, 15 bp, synthetic construct
  source 1..15: mol_type = other DNA
ggtttgattcttggc

SEQ ID NO: 5970 - DNA, 15 bp, synthetic construct
  source 1..15: mol_type = other DNA
catgattctcataga

SEQ ID NO: 5971 - DNA, 15 bp, synthetic construct
  source 1..15: mol_type = other DNA
tataaacatttgaat

SEQ ID NO: 5972 - DNA, 15 bp, synthetic construct
  source 1..15: mol_type = other DNA
agttaccagattgtt

SEQ ID NO: 5973 - DNA, 15 bp, synthetic construct
  source 1..15: mol_type = other DNA
gcatctgcctaacgg

SEQ ID NO: 5974 - DNA, 15 bp, synthetic construct
  source 1..15: mol_type = other DNA
gggatcaaaatattc

SEQ ID NO: 5975 - DNA, 15 bp, synthetic construct
  source 1..15: mol_type = other DNA
ggtacagtcggcata

SEQ ID NO: 5976 - DNA, 15 bp, synthetic construct
  source 1..15: mol_type = other DNA
gactcttagatggct

SEQ ID NO: 5977 - DNA, 15 bp, synthetic construct
  source 1..15: mol_type = other DNA
gcttcactgaggtaa

SEQ ID NO: 5978 - DNA, 15 bp, synthetic construct
  source 1..15: mol_type = other DNA
acttgcttgtagact

SEQ ID NO: 5979 - DNA, 15 bp, synthetic construct
  source 1..15: mol_type = other DNA
gctagccctgctttg

SEQ ID NO: 5980 - DNA, 15 bp, synthetic construct
  source 1..15: mol_type = other DNA
ccctaaaaagtcaat

SEQ ID NO: 5981 - DNA, 15 bp, synthetic construct
  source 1..15: mol_type = other DNA
atactaacttaggta

SEQ ID NO: 5982 - DNA, 15 bp, synthetic construct
  source 1..15: mol_type = other DNA
gaagtagaagcattt

SEQ ID NO: 5983 - DNA, 15 bp, synthetic construct
  source 1..15: mol_type = other DNA
atagtctgatatgtg

SEQ ID NO: 5984 - DNA, 15 bp, synthetic construct
  source 1..15: mol_type = other DNA
attagctctttatct

SEQ ID NO: 5985 - DNA, 15 bp, synthetic construct
  source 1..15: mol_type = other DNA
taactttcaagggtt

SEQ ID NO: 5986 - DNA, 15 bp, synthetic construct
  source 1..15: mol_type = other DNA
gatggtagagaatcg

SEQ ID NO: 5987 - DNA, 15 bp, synthetic construct
  source 1..15: mol_type = other DNA
ctctccctctcaata

SEQ ID NO: 5988 - DNA, 15 bp, synthetic construct
  source 1..15: mol_type = other DNA
tttgctttttccagt

SEQ ID NO: 5989 - DNA, 15 bp, synthetic construct
  source 1..15: mol_type = other DNA
aatgtaaacatagtt

SEQ ID NO: 5990 - DNA, 15 bp, synthetic construct
  source 1..15: mol_type = other DNA
aatggatgataaggt

SEQ ID NO: 5991 - DNA, 15 bp, synthetic construct
  source 1..15: mol_type = other DNA
tcacagagtagcctt

SEQ ID NO: 5992 - DNA, 15 bp, synthetic construct
  source 1..15: mol_type = other DNA
gtttaaaacaaaggt

SEQ ID NO: 5993 - DNA, 15 bp, synthetic construct
  source 1..15: mol_type = other DNA
atctctggattagac

SEQ ID NO: 5994 - DNA, 15 bp, synthetic construct
  source 1..15: mol_type = other DNA
cctgagtcctatgaa

SEQ ID NO: 5995 - DNA, 15 bp, synthetic construct
  source 1..15: mol_type = other DNA
tctaaatgcatgcca

SEQ ID NO: 5996 - DNA, 15 bp, synthetic construct
  source 1..15: mol_type = other DNA
ttcttgaaagagacc

SEQ ID NO: 5997 - DNA, 15 bp, synthetic construct
  source 1..15: mol_type = other DNA
gaatgtcagcatccc

SEQ ID NO: 5998 - DNA, 15 bp, synthetic construct
  source 1..15: mol_type = other DNA
aaatgccccaaatca

SEQ ID NO: 5999 - DNA, 15 bp, synthetic construct
  source 1..15: mol_type = other DNA
tttatcagttggctt

SEQ ID NO: 6000 - DNA, 15 bp, synthetic construct
  source 1..15: mol_type = other DNA
gaaatgtaggtaatt

SEQ ID NO: 6001 - DNA, 15 bp, synthetic construct
  source 1..15: mol_type = other DNA
gtgattaaaagatct

SEQ ID NO: 6002 - DNA, 15 bp, synthetic construct
  source 1..15: mol_type = other DNA
ctctaaaacgtgtgc

SEQ ID NO: 6003 - DNA, 15 bp, synthetic construct
  source 1..15: mol_type = other DNA
tacttctgctcaaac

SEQ ID NO: 6004 - DNA, 15 bp, synthetic construct
  source 1..15: mol_type = other DNA
ctcctatgtcttgaa

SEQ ID NO: 6005 - DNA, 15 bp, synthetic construct
  source 1..15: mol_type = other DNA
ctttctgcaatggag

SEQ ID NO: 6006 - DNA, 15 bp, synthetic construct
  source 1..15: mol_type = other DNA
gcatttccctatcct

SEQ ID NO: 6007 - DNA, 15 bp, synthetic construct
  source 1..15: mol_type = other DNA
cacagtgtctgagtc

SEQ ID NO: 6008 - DNA, 15 bp, synthetic construct
  source 1..15: mol_type = other DNA
cagacagatgctcag

SEQ ID NO: 6009 - DNA, 15 bp, synthetic construct
  source 1..15: mol_type = other DNA
aagaaaggcaacatc

SEQ ID NO: 6010 - DNA, 15 bp, synthetic construct
  source 1..15: mol_type = other DNA
cttgaagtggagttt

SEQ ID NO: 6011 - DNA, 15 bp, synthetic construct
  source 1..15: mol_type = other DNA
aataaggctcaaaat

SEQ ID NO: 6012 - DNA, 15 bp, synthetic construct
  source 1..15: mol_type = other DNA
tgggaaattattgtt

SEQ ID NO: 6013 - DNA, 15 bp, synthetic construct
  source 1..15: mol_type = other DNA
acttaacgtgtgttc

SEQ ID NO: 6014 - DNA, 15 bp, synthetic construct
  source 1..15: mol_type = other DNA
gcagagttggagttg

SEQ ID NO: 6015 - DNA, 15 bp, synthetic construct
  source 1..15: mol_type = other DNA
actctaagcaagcag

SEQ ID NO: 6016 - DNA, 15 bp, synthetic construct
  source 1..15: mol_type = other DNA
cctgcctgattcttt

SEQ ID NO: 6017 - DNA, 15 bp, synthetic construct
  source 1..15: mol_type = other DNA
aacacagcatgtaaa

SEQ ID NO: 6018 - DNA, 15 bp, synthetic construct
  source 1..15: mol_type = other DNA
ctaaaatggattgtt

SEQ ID NO: 6019 - DNA, 15 bp, synthetic construct
  source 1..15: mol_type = other DNA
cgtttgtctttagag

SEQ ID NO: 6020 - DNA, 15 bp, synthetic construct
  source 1..15: mol_type = other DNA
gcagatattctttcg

SEQ ID NO: 6021 - DNA, 15 bp, synthetic construct
  source 1..15: mol_type = other DNA
gtcttttactgaagt

SEQ ID NO: 6022 - DNA, 15 bp, synthetic construct
  source 1..15: mol_type = other DNA
tgtgttcattcttga

SEQ ID NO: 6023 - DNA, 15 bp, synthetic construct
  source 1..15: mol_type = other DNA
acacgaatcagacta

SEQ ID NO: 6024 - DNA, 15 bp, synthetic construct
  source 1..15: mol_type = other DNA
tgaaacctttccttt

SEQ ID NO: 6025 - DNA, 15 bp, synthetic construct
  source 1..15: mol_type = other DNA
tgaactaaggattcc

SEQ ID NO: 6026 - DNA, 15 bp, synthetic construct
  source 1..15: mol_type = other DNA
agttgaatatgcact

SEQ ID NO: 6027 - DNA, 15 bp, synthetic construct
  source 1..15: mol_type = other DNA
acagaacagctggaa

SEQ ID NO: 6028 - DNA, 15 bp, synthetic construct
  source 1..15: mol_type = other DNA
gtttggatgtgattg

SEQ ID NO: 6029 - DNA, 15 bp, synthetic construct
  source 1..15: mol_type = other DNA
agtaatggcctctgt

SEQ ID NO: 6030 - DNA, 15 bp, synthetic construct
  source 1..15: mol_type = other DNA
ctcattttgagtgtg

SEQ ID NO: 6031 - DNA, 30 bp, synthetic construct
  source 1..30: mol_type = other DNA
aataggcagccatgagtgattaaaagatct

SEQ ID NO: 6032 - DNA, 15 bp, synthetic construct
  source 1..15: mol_type = other DNA
tgtattggccatggg

SEQ ID NO: 6033 - DNA, 15 bp, synthetic construct
  source 1..15: mol_type = other DNA
tctgtagtcctagcc

SEQ ID NO: 6034 - DNA, 15 bp, synthetic construct
  source 1..15: mol_type = other DNA
tatactgccacctct

SEQ ID NO: 6035 - DNA, 15 bp, synthetic construct
  source 1..15: mol_type = other DNA
tctcttgctagctga

SEQ ID NO: 6036 - DNA, 15 bp, synthetic construct
  source 1..15: mol_type = other DNA
gatgcagaaaagttt

SEQ ID NO: 6037 - DNA, 15 bp, synthetic construct
  source 1..15: mol_type = other DNA
acagcaagctaaaag

SEQ ID NO: 6038 - DNA, 15 bp, synthetic construct
  source 1..15: mol_type = other DNA
tctggctgagctcca

SEQ ID NO: 6039 - DNA, 15 bp, synthetic construct
  source 1..15: mol_type = other DNA
tcagccagaaattat

SEQ ID NO: 6040 - DNA, 15 bp, synthetic construct
  source 1..15: mol_type = other DNA
tcctgaagctgatag

SEQ ID NO: 6041 - DNA, 15 bp, synthetic construct
  source 1..15: mol_type = other DNA
aggttagcctgcaaa

SEQ ID NO: 6042 - DNA, 15 bp, synthetic construct
  source 1..15: mol_type = other DNA
gaagaatacaggcaa

SEQ ID NO: 6043 - DNA, 15 bp, synthetic construct
  source 1..15: mol_type = other DNA
agataaaagatttct

SEQ ID NO: 6044 - DNA, 15 bp, synthetic construct
  source 1..15: mol_type = other DNA
gtagtaaatcctgtg

SEQ ID NO: 6045 - DNA, 15 bp, synthetic construct
  source 1..15: mol_type = other DNA
tgtcctggctgttgc

SEQ ID NO: 6046 - DNA, 15 bp, synthetic construct
  source 1..15: mol_type = other DNA
ttattctcagagaaa

SEQ ID NO: 6047 - DNA, 15 bp, synthetic construct
  source 1..15: mol_type = other DNA
attgtcagctaccat

SEQ ID NO: 6048 - DNA, 15 bp, synthetic construct
  source 1..15: mol_type = other DNA
taaacttgatcttgt

SEQ ID NO: 6049 - DNA, 15 bp, synthetic construct
  source 1..15: mol_type = other DNA
attatgtcttgagct

SEQ ID NO: 6050 - DNA, 15 bp, synthetic construct
  source 1..15: mol_type = other DNA
acatgcaaaggatga

SEQ ID NO: 6051 - DNA, 15 bp, synthetic construct
  source 1..15: mol_type = other DNA
gaatgcagttctgta

SEQ ID NO: 6052 - DNA, 15 bp, synthetic construct
  source 1..15: mol_type = other DNA
gatgctattgataag

SEQ ID NO: 6053 - DNA, 15 bp, synthetic construct
  source 1..15: mol_type = other DNA
aaaattctgctgcta

SEQ ID NO: 6054 - DNA, 15 bp, synthetic construct
  source 1..15: mol_type = other DNA
ctcttggaaatcttt

SEQ ID NO: 6055 - DNA, 15 bp, synthetic construct
  source 1..15: mol_type = other DNA
tttccccaatgatat

SEQ ID NO: 6056 - DNA, 15 bp, synthetic construct
  source 1..15: mol_type = other DNA
cagcttctgatagtg

SEQ ID NO: 6057 - DNA, 15 bp, synthetic construct
  source 1..15: mol_type = other DNA
gaaatcgaagggttg

SEQ ID NO: 6058 - DNA, 15 bp, synthetic construct
  source 1..15: mol_type = other DNA
attgttctgtaactt

SEQ ID NO: 6059 - DNA, 15 bp, synthetic construct
  source 1..15: mol_type = other DNA
gacagactcaaagaa

SEQ ID NO: 6060 - DNA, 15 bp, synthetic construct
  source 1..15: mol_type = other DNA
ttaaaacgtggctct

SEQ ID NO: 6061 - DNA, 15 bp, synthetic construct
  source 1..15: mol_type = other DNA
gctgggccaaattct

SEQ ID NO: 6062 - DNA, 15 bp, synthetic construct
  source 1..15: mol_type = other DNA
tcacacctctgcttg

SEQ ID NO: 6063 - DNA, 15 bp, synthetic construct
  source 1..15: mol_type = other DNA
acagagacccatctc

SEQ ID NO: 6064 - DNA, 15 bp, synthetic construct
  source 1..15: mol_type = other DNA
gaattataaataatg

SEQ ID NO: 6065 - DNA, 15 bp, synthetic construct
  source 1..15: mol_type = other DNA
aaactccttctttta

SEQ ID NO: 6066 - DNA, 15 bp, synthetic construct
  source 1..15: mol_type = other DNA
aaactccttctttta

SEQ ID NO: 6067 - DNA, 15 bp, synthetic construct
  source 1..15: mol_type = other DNA
ataccatgttcattg

SEQ ID NO: 6068 - DNA, 15 bp, synthetic construct
  source 1..15: mol_type = other DNA
ggattaacatagtct

SEQ ID NO: 6069 - DNA, 15 bp, synthetic construct
  source 1..15: mol_type = other DNA
tgagctatgattgtg

SEQ ID NO: 6070 - DNA, 15 bp, synthetic construct
  source 1..15: mol_type = other DNA
tggagactgctgcct

SEQ ID NO: 6071 - DNA, 15 bp, synthetic construct
  source 1..15: mol_type = other DNA
acttcaggcattccc

SEQ ID NO: 6072 - DNA, 15 bp, synthetic construct
  source 1..15: mol_type = other DNA
ttacccatttgagac

SEQ ID NO: 6073 - DNA, 15 bp, synthetic construct
  source 1..15: mol_type = other DNA
actctgctaatctgc

SEQ ID NO: 6074 - DNA, 15 bp, synthetic construct
  source 1..15: mol_type = other DNA
tcataacaccttctg

SEQ ID NO: 6075 - DNA, 15 bp, synthetic construct
  source 1..15: mol_type = other DNA
tttagaagataagat

SEQ ID NO: 6076 - DNA, 15 bp, synthetic construct
  source 1..15: mol_type = other DNA
ttagttttgacatcc

SEQ ID NO: 6077 - DNA, 15 bp, synthetic construct
  source 1..15: mol_type = other DNA
atacattttcaagac

SEQ ID NO: 6078 - DNA, 15 bp, synthetic construct
  source 1..15: mol_type = other DNA
acaggagagcttttc

SEQ ID NO: 6079 - DNA, 15 bp, synthetic construct
  source 1..15: mol_type = other DNA
tcatttccttaggct

SEQ ID NO: 6080 - DNA, 15 bp, synthetic construct
  source 1..15: mol_type = other DNA
gaaggatgttattgt

SEQ ID NO: 6081 - DNA, 15 bp, synthetic construct
  source 1..15: mol_type = other DNA
tcatttccttaggct

SEQ ID NO: 6082 - DNA, 15 bp, synthetic construct
  source 1..15: mol_type = other DNA
gaaggatgttattgt

SEQ ID NO: 6083 - DNA, 15 bp, synthetic construct
  source 1..15: mol_type = other DNA
tttaacatcacccta

SEQ ID NO: 6084 - DNA, 15 bp, synthetic construct
  source 1..15: mol_type = other DNA
ttctggcacctcttg

SEQ ID NO: 6085 - DNA, 15 bp, synthetic construct
  source 1..15: mol_type = other DNA
cctcctgtagatcct

SEQ ID NO: 6086 - DNA, 15 bp, synthetic construct
  source 1..15: mol_type = other DNA
tgttttacttaattg

SEQ ID NO: 6087 - DNA, 15 bp, synthetic construct
  source 1..15: mol_type = other DNA
ttctgggcaaacatt

SEQ ID NO: 6088 - DNA, 15 bp, synthetic construct
  source 1..15: mol_type = other DNA
aaatagaaggctggt

SEQ ID NO: 6089 - DNA, 15 bp, synthetic construct
  source 1..15: mol_type = other DNA
ggtcatcatcaaagg

SEQ ID NO: 6090 - DNA, 15 bp, synthetic construct
  source 1..15: mol_type = other DNA
gaggaaaaggtcgga

SEQ ID NO: 6091 - DNA, 15 bp, synthetic construct
  source 1..15: mol_type = other DNA
ttaagacacaacccc

SEQ ID NO: 6092 - DNA, 15 bp, synthetic construct
  source 1..15: mol_type = other DNA
tgtctcatgtgccat

SEQ ID NO: 6093 - DNA, 15 bp, synthetic construct
  source 1..15: mol_type = other DNA
cccacgggtcggtag

SEQ ID NO: 6094 - DNA, 15 bp, synthetic construct
  source 1..15: mol_type = other DNA
tgggatgtcgtggct

SEQ ID NO: 6095 - DNA, 15 bp, synthetic construct
  source 1..15: mol_type = other DNA
cggttcttacagtca

SEQ ID NO: 6096 - DNA, 15 bp, synthetic construct
  source 1..15: mol_type = other DNA
tgcattctgcggttc

SEQ ID NO: 6097 - DNA, 15 bp, synthetic construct
  source 1..15: mol_type = other DNA
cctgtatgggatatc

SEQ ID NO: 6098 - DNA, 15 bp, synthetic construct
  source 1..15: mol_type = other DNA
agaatctctcaaagg

SEQ ID NO: 6099 - DNA, 15 bp, synthetic construct
  source 1..15: mol_type = other DNA
aaccttcaaaggctg

SEQ ID NO: 6100 - DNA, 15 bp, synthetic construct
  source 1..15: mol_type = other DNA
aggcaaatgtatgtg

SEQ ID NO: 6101 - DNA, 15 bp, synthetic construct
  source 1..15: mol_type = other DNA
gtaccaccattggaa

SEQ ID NO: 6102 - DNA, 15 bp, synthetic construct
  source 1..15: mol_type = other DNA
gtatcaaatgaaatc

SEQ ID NO: 6103 - DNA, 15 bp, synthetic construct
  source 1..15: mol_type = other DNA
aacaaaagcagaata

SEQ ID NO: 6104 - DNA, 15 bp, synthetic construct
  source 1..15: mol_type = other DNA
caatgttttgtgcct

SEQ ID NO: 6105 - DNA, 15 bp, synthetic construct
  source 1..15: mol_type = other DNA
ttagctggccacatc

SEQ ID NO: 6106 - DNA, 15 bp, synthetic construct
  source 1..15: mol_type = other DNA
caccaagtactttct

SEQ ID NO: 6107 - DNA, 15 bp, synthetic construct
  source 1..15: mol_type = other DNA
ctgtacgggcagttc

SEQ ID NO: 6108 - DNA, 15 bp, synthetic construct
  source 1..15: mol_type = other DNA
ctgttcttggtgtct

SEQ ID NO: 6109 - DNA, 15 bp, synthetic construct
  source 1..15: mol_type = other DNA
tgaaggtgattgtag

SEQ ID NO: 6110 - DNA, 15 bp, synthetic construct
  source 1..15: mol_type = other DNA
ccagtgccgagagtt

SEQ ID NO: 6111 - DNA, 15 bp, synthetic construct
  source 1..15: mol_type = other DNA
aatccagtcaccaag

SEQ ID NO: 6112 - DNA, 15 bp, synthetic construct
  source 1..15: mol_type = other DNA
agtccacttcaatat

SEQ ID NO: 6113 - DNA, 15 bp, synthetic construct
  source 1..15: mol_type = other DNA
gagtgcagaatgaag

SEQ ID NO: 6114 - DNA, 15 bp, synthetic construct
  source 1..15: mol_type = other DNA
ttcggtggagtacta

SEQ ID NO: 6115 - DNA, 15 bp, synthetic construct
  source 1..15: mol_type = other DNA
ttcgttggaagcagc

SEQ ID NO: 6116 - DNA, 15 bp, synthetic construct
  source 1..15: mol_type = other DNA
ccaaatctctgttgt

SEQ ID NO: 6117 - DNA, 15 bp, synthetic construct
  source 1..15: mol_type = other DNA
tcccctcctctaatc

SEQ ID NO: 6118 - DNA, 15 bp, synthetic construct
  source 1..15: mol_type = other DNA
agcgttgaggtttac

SEQ ID NO: 6119 - DNA, 15 bp, synthetic construct
  source 1..15: mol_type = other DNA
cattacctgcgttgc

SEQ ID NO: 6120 - DNA, 15 bp, synthetic construct
  source 1..15: mol_type = other DNA
ttctggttactgtag

SEQ ID NO: 6121 - DNA, 15 bp, synthetic construct
  source 1..15: mol_type = other DNA
acttgtgagcaaatc

SEQ ID NO: 6122 - DNA, 15 bp, synthetic construct
  source 1..15: mol_type = other DNA
gttgcagatagggtt

SEQ ID NO: 6123 - DNA, 15 bp, synthetic construct
  source 1..15: mol_type = other DNA
taacccagaggagtg

SEQ ID NO: 6124 - DNA, 15 bp, synthetic construct
  source 1..15: mol_type = other DNA
tgagtctcttgtctc

SEQ ID NO: 6125 - DNA, 15 bp, synthetic construct
  source 1..15: mol_type = other DNA
tcgttggtcttgtag

SEQ ID NO: 6126 - DNA, 15 bp, synthetic construct
  source 1..15: mol_type = other DNA
ctgagtcaagtctta

SEQ ID NO: 6127 - DNA, 15 bp, synthetic construct
  source 1..15: mol_type = other DNA
tcctagaaagcctag

SEQ ID NO: 6128 - DNA, 15 bp, synthetic construct
  source 1..15: mol_type = other DNA
cttgctctacgcagt

SEQ ID NO: 6129 - DNA, 15 bp, synthetic construct
  source 1..15: mol_type = other DNA
ctaaacctaccagta

SEQ ID NO: 6130 - DNA, 15 bp, synthetic construct
  source 1..15: mol_type = other DNA
ttgatgtcttggttt

SEQ ID NO: 6131 - DNA, 15 bp, synthetic construct
  source 1..15: mol_type = other DNA
agtagctcacgactt

SEQ ID NO: 6132 - DNA, 15 bp, synthetic construct
  source 1..15: mol_type = other DNA
agggataccataaat

SEQ ID NO: 6133 - DNA, 30 bp, synthetic construct
  source 1..30: mol_type = other DNA
attcaagaggaaccaagggataccataaat

SEQ ID NO: 6134 - DNA, 15 bp, synthetic construct
  source 1..15: mol_type = other DNA
gaggccatgaaatac

SEQ ID NO: 6135 - DNA, 15 bp, synthetic construct
  source 1..15: mol_type = other DNA
ggttcttaatcaata

SEQ ID NO: 6136 - DNA, 15 bp, synthetic construct
  source 1..15: mol_type = other DNA
gttgtaactctttgg

SEQ ID NO: 6137 - DNA, 15 bp, synthetic construct
  source 1..15: mol_type = other DNA
ccactaaaccctcaa

SEQ ID NO: 6138 - DNA, 15 bp, synthetic construct
  source 1..15: mol_type = other DNA
ctttactgaagttgc

SEQ ID NO: 6139 - DNA, 15 bp, synthetic construct
  source 1..15: mol_type = other DNA
caaaccacaagtcct

SEQ ID NO: 6140 - DNA, 15 bp, synthetic construct
  source 1..15: mol_type = other DNA
cacagattgtcatgg

SEQ ID NO: 6141 - DNA, 15 bp, synthetic construct
  source 1..15: mol_type = other DNA
gtgattagatccaca

SEQ ID NO: 6142 - DNA, 15 bp, synthetic construct
  source 1..15: mol_type = other DNA
ggatccaatatctga

SEQ ID NO: 6143 - DNA, 15 bp, synthetic construct
  source 1..15: mol_type = other DNA
gtaaaatggtgggtc

SEQ ID NO: 6144 - DNA, 15 bp, synthetic construct
  source 1..15: mol_type = other DNA
aaggtaaacatatcc

SEQ ID NO: 6145 - DNA, 15 bp, synthetic construct
  source 1..15: mol_type = other DNA
atctggcgtagagaa

SEQ ID NO: 6146 - DNA, 15 bp, synthetic construct
  source 1..15: mol_type = other DNA
tggtgtcttacagta

SEQ ID NO: 6147 - DNA, 15 bp, synthetic construct
  source 1..15: mol_type = other DNA
ctcgacatcttctgc

SEQ ID NO: 6148 - DNA, 15 bp, synthetic construct
  source 1..15: mol_type = other DNA
ccttaggaaagcatg

SEQ ID NO: 6149 - DNA, 15 bp, synthetic construct
  source 1..15: mol_type = other DNA
tgacttctgttctca

SEQ ID NO: 6150 - DNA, 15 bp, synthetic construct
  source 1..15: mol_type = other DNA
atgggtttaccaatg

SEQ ID NO: 6151 - DNA, 15 bp, synthetic construct
  source 1..15: mol_type = other DNA
cgccctttaagatcc

SEQ ID NO: 6152 - DNA, 15 bp, synthetic construct
  source 1..15: mol_type = other DNA
gctgatcagatttcc

SEQ ID NO: 6153 - DNA, 15 bp, synthetic construct
  source 1..15: mol_type = other DNA
agtcgggtgctggta

SEQ ID NO: 6154 - DNA, 15 bp, synthetic construct
  source 1..15: mol_type = other DNA
gtgggctccgtgagt

SEQ ID NO: 6155 - DNA, 15 bp, synthetic construct
  source 1..15: mol_type = other DNA
cttgagcagctcgtc

SEQ ID NO: 6156 - DNA, 15 bp, synthetic construct
  source 1..15: mol_type = other DNA
ccatctctccactat

SEQ ID NO: 6157 - DNA, 15 bp, synthetic construct
  source 1..15: mol_type = other DNA
ctgattctttatagc

SEQ ID NO: 6158 - DNA, 15 bp, synthetic construct
  source 1..15: mol_type = other DNA
gtcaagcttctctac

SEQ ID NO: 6159 - DNA, 15 bp, synthetic construct
  source 1..15: mol_type = other DNA
tactcacatgtcagg

SEQ ID NO: 6160 - DNA, 15 bp, synthetic construct
  source 1..15: mol_type = other DNA
tcagaggttaatgtt

SEQ ID NO: 6161 - DNA, 15 bp, synthetic construct
  source 1..15: mol_type = other DNA
acctatacgtttcca

SEQ ID NO: 6162 - DNA, 15 bp, synthetic construct
  source 1..15: mol_type = other DNA
cttcttacattgtga

SEQ ID NO: 6163 - DNA, 15 bp, synthetic construct
  source 1..15: mol_type = other DNA
ggcccaaaacaatgg

SEQ ID NO: 6164 - DNA, 15 bp, synthetic construct
  source 1..15: mol_type = other DNA
atgtgctttaagagt

SEQ ID NO: 6165 - DNA, 15 bp, synthetic construct
  source 1..15: mol_type = other DNA
cagtctatccttgat

SEQ ID NO: 6166 - DNA, 15 bp, synthetic construct
  source 1..15: mol_type = other DNA
actgctattccaatg

SEQ ID NO: 6167 - DNA, 15 bp, synthetic construct
  source 1..15: mol_type = other DNA
gatgaccaagctgac

SEQ ID NO: 6168 - DNA, 15 bp, synthetic construct
  source 1..15: mol_type = other DNA
atgaggttagaagac

SEQ ID NO: 6169 - DNA, 15 bp, synthetic construct
  source 1..15: mol_type = other DNA
attgatgaggaccag

SEQ ID NO: 6170 - DNA, 15 bp, synthetic construct
  source 1..15: mol_type = other DNA
aaatggaactgacaa

SEQ ID NO: 6171 - DNA, 15 bp, synthetic construct
  source 1..15: mol_type = other DNA
gccaaacaaaccacc

SEQ ID NO: 6172 - DNA, 15 bp, synthetic construct
  source 1..15: mol_type = other DNA
accatgtgagtttag

SEQ ID NO: 6173 - DNA, 15 bp, synthetic construct
  source 1..15: mol_type = other DNA
gtttctgggctatcc

SEQ ID NO: 6174 - DNA, 15 bp, synthetic construct
  source 1..15: mol_type = other DNA
tctgcatgatatcag

SEQ ID NO: 6175 - DNA, 15 bp, synthetic construct
  source 1..15: mol_type = other DNA
ctagaccctaacccc

SEQ ID NO: 6176 - DNA, 15 bp, synthetic construct
  source 1..15: mol_type = other DNA
cccatacttcacatc

SEQ ID NO: 6177 - DNA, 15 bp, synthetic construct
  source 1..15: mol_type = other DNA
agaaagcagaaatag

SEQ ID NO: 6178 - DNA, 15 bp, synthetic construct
  source 1..15: mol_type = other DNA
tttcttaagcagtca

SEQ ID NO: 6179 - DNA, 15 bp, synthetic construct
  source 1..15: mol_type = other DNA
gaaggactttcatcc

SEQ ID NO: 6180 - DNA, 15 bp, synthetic construct
  source 1..15: mol_type = other DNA
actagacaccttcct

SEQ ID NO: 6181 - DNA, 15 bp, synthetic construct
  source 1..15: mol_type = other DNA
tgaaatcaaattgga

SEQ ID NO: 6182 - DNA, 15 bp, synthetic construct
  source 1..15: mol_type = other DNA
tcatcctcataaagt

SEQ ID NO: 6183 - DNA, 15 bp, synthetic construct
  source 1..15: mol_type = other DNA
gtgattcctacttca

SEQ ID NO: 6184 - DNA, 15 bp, synthetic construct
  source 1..15: mol_type = other DNA
aaagcaacgcagatg

SEQ ID NO: 6185 - DNA, 15 bp, synthetic construct
  source 1..15: mol_type = other DNA
gaggatacgaacaga

SEQ ID NO: 6186 - DNA, 15 bp, synthetic construct
  source 1..15: mol_type = other DNA
ctgactgacccctat

SEQ ID NO: 6187 - DNA, 15 bp, synthetic construct
  source 1..15: mol_type = other DNA
gtcagatggcctatt

SEQ ID NO: 6188 - DNA, 15 bp, synthetic construct
  source 1..15: mol_type = other DNA
tccataagcattttg

SEQ ID NO: 6189 - DNA, 15 bp, synthetic construct
  source 1..15: mol_type = other DNA
ggtgtactatgcagt

SEQ ID NO: 6190 - DNA, 15 bp, synthetic construct
  source 1..15: mol_type = other DNA
ttcctgtttcatagc

SEQ ID NO: 6191 - DNA, 15 bp, synthetic construct
  source 1..15: mol_type = other DNA
atcctttcaagaccc

SEQ ID NO: 6192 - DNA, 15 bp, synthetic construct
  source 1..15: mol_type = other DNA
ctctcatcctctgtg

SEQ ID NO: 6193 - DNA, 15 bp, synthetic construct
  source 1..15: mol_type = other DNA
tgtggacgatgcaga

SEQ ID NO: 6194 - DNA, 15 bp, synthetic construct
  source 1..15: mol_type = other DNA
ttctttgcttatttt

SEQ ID NO: 6195 - DNA, 15 bp, synthetic construct
  source 1..15: mol_type = other DNA
cggtgcagtcaaatc

SEQ ID NO: 6196 - DNA, 15 bp, synthetic construct
  source 1..15: mol_type = other DNA
aagtagatgatgatg

SEQ ID NO: 6197 - DNA, 15 bp, synthetic construct
  source 1..15: mol_type = other DNA
agacacaaacattac

SEQ ID NO: 6198 - DNA, 15 bp, synthetic construct
  source 1..15: mol_type = other DNA
tgaactgataagcaa

SEQ ID NO: 6199 - DNA, 15 bp, synthetic construct
  source 1..15: mol_type = other DNA
gaaggctaataggaa

SEQ ID NO: 6200 - DNA, 15 bp, synthetic construct
  source 1..15: mol_type = other DNA
ttaacatgtataatc

SEQ ID NO: 6201 - DNA, 15 bp, synthetic construct
  source 1..15: mol_type = other DNA
tggttctcttaccct

SEQ ID NO: 6202 - DNA, 15 bp, synthetic construct
  source 1..15: mol_type = other DNA
cactcaataaaaagc

SEQ ID NO: 6203 - DNA, 15 bp, synthetic construct
  source 1..15: mol_type = other DNA
ataagtgataattct

SEQ ID NO: 6204 - DNA, 15 bp, synthetic construct
  source 1..15: mol_type = other DNA
cagaatcaaaagcca

SEQ ID NO: 6205 - DNA, 15 bp, synthetic construct
  source 1..15: mol_type = other DNA
ggctgtttgaaatca

SEQ ID NO: 6206 - DNA, 15 bp, synthetic construct
  source 1..15: mol_type = other DNA
aggctatttgctatc

SEQ ID NO: 6207 - DNA, 15 bp, synthetic construct
  source 1..15: mol_type = other DNA
gcctctaatgaactt

SEQ ID NO: 6208 - DNA, 15 bp, synthetic construct
  source 1..15: mol_type = other DNA
gcttttcctcatcac

SEQ ID NO: 6209 - DNA, 15 bp, synthetic construct
  source 1..15: mol_type = other DNA
gtgaagctctgctat

SEQ ID NO: 6210 - DNA, 15 bp, synthetic construct
  source 1..15: mol_type = other DNA
aggcttctgttttgc

SEQ ID NO: 6211 - DNA, 15 bp, synthetic construct
  source 1..15: mol_type = other DNA
ttatctatgcagaaa

SEQ ID NO: 6212 - DNA, 15 bp, synthetic construct
  source 1..15: mol_type = other DNA
aggttgaattttgga

SEQ ID NO: 6213 - DNA, 15 bp, synthetic construct
  source 1..15: mol_type = other DNA
cagattttacaaatg

SEQ ID NO: 6214 - DNA, 15 bp, synthetic construct
  source 1..15: mol_type = other DNA
aaatgctggccaaag

SEQ ID NO: 6215 - DNA, 15 bp, synthetic construct
  source 1..15: mol_type = other DNA
tgctcttctgatacc

SEQ ID NO: 6216 - DNA, 15 bp, synthetic construct
  source 1..15: mol_type = other DNA
attctgactagaagc

SEQ ID NO: 6217 - DNA, 15 bp, synthetic construct
  source 1..15: mol_type = other DNA
aaagccatcaaaacc

SEQ ID NO: 6218 - DNA, 15 bp, synthetic construct
  source 1..15: mol_type = other DNA
tctgaattgtgtgtg

SEQ ID NO: 6219 - DNA, 15 bp, synthetic construct
  source 1..15: mol_type = other DNA
gtctctaaggttttg

SEQ ID NO: 6220 - DNA, 15 bp, synthetic construct
  source 1..15: mol_type = other DNA
tctcgcaatttggat

SEQ ID NO: 6221 - DNA, 15 bp, synthetic construct
  source 1..15: mol_type = other DNA
taggcgcaactgtgg

SEQ ID NO: 6222 - DNA, 15 bp, synthetic construct
  source 1..15: mol_type = other DNA
ccatcttcacttgtt

SEQ ID NO: 6223 - DNA, 15 bp, synthetic construct
  source 1..15: mol_type = other DNA
ggatccccttcagat

SEQ ID NO: 6224 - DNA, 15 bp, synthetic construct
  source 1..15: mol_type = other DNA
atgcgcttacgaggt

SEQ ID NO: 6225 - DNA, 15 bp, synthetic construct
  source 1..15: mol_type = other DNA
agtgagaatgatgaa

SEQ ID NO: 6226 - DNA, 15 bp, synthetic construct
  source 1..15: mol_type = other DNA
gtcagcatgattttg

SEQ ID NO: 6227 - DNA, 15 bp, synthetic construct
  source 1..15: mol_type = other DNA
agagcatagaactcc

SEQ ID NO: 6228 - DNA, 15 bp, synthetic construct
  source 1..15: mol_type = other DNA
tcagaaggacaatgt

SEQ ID NO: 6229 - DNA, 15 bp, synthetic construct
  source 1..15: mol_type = other DNA
gagtatcagatggtc

SEQ ID NO: 6230 - DNA, 15 bp, synthetic construct
  source 1..15: mol_type = other DNA
tttcctaaggaccag

SEQ ID NO: 6231 - DNA, 15 bp, synthetic construct
  source 1..15: mol_type = other DNA
ccactttttgtagcc

SEQ ID NO: 6232 - DNA, 15 bp, synthetic construct
  source 1..15: mol_type = other DNA
aactggaggctcttc

SEQ ID NO: 6233 - DNA, 15 bp, synthetic construct
  source 1..15: mol_type = other DNA
gtgctcagaacaagc

SEQ ID NO: 6234 - DNA, 15 bp, synthetic construct
  source 1..15: mol_type = other DNA
atactgagaccccaa

SEQ ID NO: 6235 - DNA, 15 bp, synthetic construct
  source 1..15: mol_type = other DNA
actgtttacttgttt

SEQ ID NO: 6236 - DNA, 15 bp, synthetic construct
  source 1..15: mol_type = other DNA
ggtctaaatcattgg

SEQ ID NO: 6237 - DNA, 15 bp, synthetic construct
  source 1..15: mol_type = other DNA
aaagaaaaccaacta

SEQ ID NO: 6238 - DNA, 15 bp, synthetic construct
  source 1..15: mol_type = other DNA
tttcatgtaggaaat

SEQ ID NO: 6239 - DNA, 15 bp, synthetic construct
  source 1..15: mol_type = other DNA
ccatggcagctgaca

SEQ ID NO: 6240 - DNA, 15 bp, synthetic construct
  source 1..15: mol_type = other DNA
acatgtaacaatttt

SEQ ID NO: 6241 - DNA, 15 bp, synthetic construct
  source 1..15: mol_type = other DNA
tggacatgtgtgtta

SEQ ID NO: 6242 - DNA, 15 bp, synthetic construct
  source 1..15: mol_type = other DNA
aagggaaagagggat

SEQ ID NO: 6243 - DNA, 15 bp, synthetic construct
  source 1..15: mol_type = other DNA
acatcaataatacag

SEQ ID NO: 6244 - DNA, 15 bp, synthetic construct
  source 1..15: mol_type = other DNA
gtgggtttcccttta

SEQ ID NO: 6245 - DNA, 15 bp, synthetic construct
  source 1..15: mol_type = other DNA
cctttgtttacttta

SEQ ID NO: 6246 - DNA, 15 bp, synthetic construct
  source 1..15: mol_type = other DNA
ctttggaggaagacc

SEQ ID NO: 6247 - DNA, 15 bp, synthetic construct
  source 1..15: mol_type = other DNA
agggagtatctatta

SEQ ID NO: 6248 - DNA, 15 bp, synthetic construct
  source 1..15: mol_type = other DNA
actttccacacaagg

SEQ ID NO: 6249 - DNA, 15 bp, synthetic construct
  source 1..15: mol_type = other DNA
tcaggaatccatacc

SEQ ID NO: 6250 - DNA, 15 bp, synthetic construct
  source 1..15: mol_type = other DNA
aactgaggttttaca

SEQ ID NO: 6251 - DNA, 15 bp, synthetic construct
  source 1..15: mol_type = other DNA
gtccctgattttcct

SEQ ID NO: 6252 - DNA, 15 bp, synthetic construct
  source 1..15: mol_type = other DNA
accttctgagcacac

SEQ ID NO: 6253 - DNA, 15 bp, synthetic construct
  source 1..15: mol_type = other DNA
gatccttgcatctaa

SEQ ID NO: 6254 - DNA, 15 bp, synthetic construct
  source 1..15: mol_type = other DNA
atggcagatgaatag

SEQ ID NO: 6255 - DNA, 15 bp, synthetic construct
  source 1..15: mol_type = other DNA
tgacttgcagtcttg

SEQ ID NO: 6256 - DNA, 15 bp, synthetic construct
  source 1..15: mol_type = other DNA
aagaaacagaggatg

SEQ ID NO: 6257 - DNA, 15 bp, synthetic construct
  source 1..15: mol_type = other DNA
ttaatgtggacagac

SEQ ID NO: 6258 - DNA, 15 bp, synthetic construct
  source 1..15: mol_type = other DNA
atgtaagggaagact

SEQ ID NO: 6259 - DNA, 15 bp, synthetic construct
  source 1..15: mol_type = other DNA
ccaacattgataaga

SEQ ID NO: 6260 - DNA, 15 bp, synthetic construct
  source 1..15: mol_type = other DNA
ggagcatatgtgaat

SEQ ID NO: 6261 - DNA, 15 bp, synthetic construct
  source 1..15: mol_type = other DNA
agagattttgaagtg

SEQ ID NO: 6262 - DNA, 15 bp, synthetic construct
  source 1..15: mol_type = other DNA
tgtgcttccgttctt

SEQ ID NO: 6263 - DNA, 15 bp, synthetic construct
  source 1..15: mol_type = other DNA
acttgttttatgcgg

SEQ ID NO: 6264 - DNA, 15 bp, synthetic construct
  source 1..15: mol_type = other DNA
aaaatttcaacctct

SEQ ID NO: 6265 - DNA, 15 bp, synthetic construct
  source 1..15: mol_type = other DNA
accccgttgcaactg

SEQ ID NO: 6266 - DNA, 15 bp, synthetic construct
  source 1..15: mol_type = other DNA
agaggagaaagtata

SEQ ID NO: 6267 - DNA, 15 bp, synthetic construct
  source 1..15: mol_type = other DNA
caggaggtatttctt

SEQ ID NO: 6268 - DNA, 15 bp, synthetic construct
  source 1..15: mol_type = other DNA
cctaccttgggaact

SEQ ID NO: 6269 - DNA, 15 bp, synthetic construct
  source 1..15: mol_type = other DNA
tccacagcagaggtc

SEQ ID NO: 6270 - DNA, 15 bp, synthetic construct
  source 1..15: mol_type = other DNA
tgaaattcagatgtc

SEQ ID NO: 6271 - DNA, 15 bp, synthetic construct
  source 1..15: mol_type = other DNA
ttggtatcctttgta

SEQ ID NO: 6272 - DNA, 15 bp, synthetic construct
  source 1..15: mol_type = other DNA
ctgccctaacactgt

SEQ ID NO: 6273 - DNA, 15 bp, synthetic construct
  source 1..15: mol_type = other DNA
tgttcaatatctgac

SEQ ID NO: 6274 - DNA, 15 bp, synthetic construct
  source 1..15: mol_type = other DNA
agcggtacaaatgga

SEQ ID NO: 6275 - DNA, 15 bp, synthetic construct
  source 1..15: mol_type = other DNA
ggaaggtcatcatcc

SEQ ID NO: 6276 - DNA, 15 bp, synthetic construct
  source 1..15: mol_type = other DNA
agtacaagacagacg

SEQ ID NO: 6277 - DNA, 15 bp, synthetic construct
  source 1..15: mol_type = other DNA
aagcagcatcgagaa

SEQ ID NO: 6278 - DNA, 15 bp, synthetic construct
  source 1..15: mol_type = other DNA
cagcaggaggtttat

SEQ ID NO: 6279 - DNA, 15 bp, synthetic construct
  source 1..15: mol_type = other DNA
caatcaacaggaatg

SEQ ID NO: 6280 - DNA, 15 bp, synthetic construct
  source 1..15: mol_type = other DNA
tctgaccttatctaa

SEQ ID NO: 6281 - DNA, 15 bp, synthetic construct
  source 1..15: mol_type = other DNA
acctcttgagagaac

SEQ ID NO: 6282 - DNA, 15 bp, synthetic construct
  source 1..15: mol_type = other DNA
tatggatttatccag

SEQ ID NO: 6283 - DNA, 15 bp, synthetic construct
  source 1..15: mol_type = other DNA
cgacaaaccctctcc

SEQ ID NO: 6284 - DNA, 15 bp, synthetic construct
  source 1..15: mol_type = other DNA
taggcctgtctgaag

SEQ ID NO: 6285 - DNA, 15 bp, synthetic construct
  source 1..15: mol_type = other DNA
ctgctcattactagc

SEQ ID NO: 6286 - DNA, 15 bp, synthetic construct
  source 1..15: mol_type = other DNA
aggagttaggtctat

SEQ ID NO: 6287 - DNA, 15 bp, synthetic construct
  source 1..15: mol_type = other DNA
tgctttggtgatgga

SEQ ID NO: 6288 - DNA, 15 bp, synthetic construct
  source 1..15: mol_type = other DNA
tgatttaacagcttg

SEQ ID NO: 6289 - DNA, 15 bp, synthetic construct
  source 1..15: mol_type = other DNA
atctgggaaagcagc

SEQ ID NO: 6290 - DNA, 15 bp, synthetic construct
  source 1..15: mol_type = other DNA
aaaagattgcccact

SEQ ID NO: 6291 - DNA, 15 bp, synthetic construct
  source 1..15: mol_type = other DNA
actacctgcacttgc

SEQ ID NO: 6292 - DNA, 15 bp, synthetic construct
  source 1..15: mol_type = other DNA
ctgtccagccactat

SEQ ID NO: 6293 - DNA, 15 bp, synthetic construct
  source 1..15: mol_type = other DNA
ggtaaccacagagca

SEQ ID NO: 6294 - DNA, 15 bp, synthetic construct
  source 1..15: mol_type = other DNA
ttgattggtactact

SEQ ID NO: 6295 - DNA, 15 bp, synthetic construct
  source 1..15: mol_type = other DNA
cagctcttaaccagg

SEQ ID NO: 6296 - DNA, 15 bp, synthetic construct
  source 1..15: mol_type = other DNA
tggttcacacaacca

SEQ ID NO: 6297 - DNA, 15 bp, synthetic construct
  source 1..15: mol_type = other DNA
ggtgtgtatttggaa

SEQ ID NO: 6298 - DNA, 15 bp, synthetic construct
  source 1..15: mol_type = other DNA
agcacttaccctgag

SEQ ID NO: 6299 - DNA, 15 bp, synthetic construct
  source 1..15: mol_type = other DNA
tgtgatgcgagggac

SEQ ID NO: 6300 - DNA, 15 bp, synthetic construct
  source 1..15: mol_type = other DNA
gcataggcagaggtc

SEQ ID NO: 6301 - DNA, 15 bp, synthetic construct
  source 1..15: mol_type = other DNA
tgtgatgcgagggac

SEQ ID NO: 6302 - DNA, 15 bp, synthetic construct
  source 1..15: mol_type = other DNA
gcataggcagaggtc

SEQ ID NO: 6303 - DNA, 15 bp, synthetic construct
  source 1..15: mol_type = other DNA
cctccctagtcctac

SEQ ID NO: 6304 - DNA, 15 bp, synthetic construct
  source 1..15: mol_type = other DNA
ccatgagcatagtgg

SEQ ID NO: 6305 - DNA, 15 bp, synthetic construct
  source 1..15: mol_type = other DNA
ccactatgctcatgg

SEQ ID NO: 6306 - DNA, 15 bp, synthetic construct
  source 1..15: mol_type = other DNA
tgaagatgtcaccag

SEQ ID NO: 6307 - DNA, 15 bp, synthetic construct
  source 1..15: mol_type = other DNA
ccactatgctcatgg

SEQ ID NO: 6308 - DNA, 15 bp, synthetic construct
  source 1..15: mol_type = other DNA
tgaagatgtcaccag

SEQ ID NO: 6309 - DNA, 15 bp, synthetic construct
  source 1..15: mol_type = other DNA
gaagggccttggaca

SEQ ID NO: 6310 - DNA, 15 bp, synthetic construct
  source 1..15: mol_type = other DNA
cacgctccccatttg

SEQ ID NO: 6311 - DNA, 15 bp, synthetic construct
  source 1..15: mol_type = other DNA
agctgggtgaccgtc

SEQ ID NO: 6312 - DNA, 15 bp, synthetic construct
  source 1..15: mol_type = other DNA
gcaaggcaggctcga

SEQ ID NO: 6313 - DNA, 15 bp, synthetic construct
  source 1..15: mol_type = other DNA
gcctgccttgcaatg

SEQ ID NO: 6314 - DNA, 15 bp, synthetic construct
  source 1..15: mol_type = other DNA
tgtcacctggatgat

SEQ ID NO: 6315 - DNA, 15 bp, synthetic construct
  source 1..15: mol_type = other DNA
atcactcgacttgtg

SEQ ID NO: 6316 - DNA, 15 bp, synthetic construct
  source 1..15: mol_type = other DNA
atgagactgtggttc

SEQ ID NO: 6317 - DNA, 15 bp, synthetic construct
  source 1..15: mol_type = other DNA
atcactcgacttgtg

SEQ ID NO: 6318 - DNA, 15 bp, synthetic construct
  source 1..15: mol_type = other DNA
atgagactgtggttc

SEQ ID NO: 6319 - DNA, 15 bp, synthetic construct
  source 1..15: mol_type = other DNA
acgagtctgtgataa

SEQ ID NO: 6320 - DNA, 15 bp, synthetic construct
  source 1..15: mol_type = other DNA
gaggaattagcaatg

SEQ ID NO: 6321 - DNA, 15 bp, synthetic construct
  source 1..15: mol_type = other DNA
gacctctttaataca

SEQ ID NO: 6322 - DNA, 15 bp, synthetic construct
  source 1..15: mol_type = other DNA
ggatgacttcaagtg

SEQ ID NO: 6323 - DNA, 15 bp, synthetic construct
  source 1..15: mol_type = other DNA
aactcccatctcagc

SEQ ID NO: 6324 - DNA, 15 bp, synthetic construct
  source 1..15: mol_type = other DNA
ggctgtgtgggattg

SEQ ID NO: 6325 - DNA, 15 bp, synthetic construct
  source 1..15: mol_type = other DNA
tcagagcccaactgg

SEQ ID NO: 6326 - DNA, 15 bp, synthetic construct
  source 1..15: mol_type = other DNA
gtattgatgaccttc

SEQ ID NO: 6327 - DNA, 15 bp, synthetic construct
  source 1..15: mol_type = other DNA
gtcaagatgctcaac

SEQ ID NO: 6328 - DNA, 15 bp, synthetic construct
  source 1..15: mol_type = other DNA
ttctttgttcacatc

SEQ ID NO: 6329 - DNA, 15 bp, synthetic construct
  source 1..15: mol_type = other DNA
gctctcccaatgtcc

SEQ ID NO: 6330 - DNA, 15 bp, synthetic construct
  source 1..15: mol_type = other DNA
ctctacatgggcact

SEQ ID NO: 6331 - DNA, 15 bp, synthetic construct
  source 1..15: mol_type = other DNA
tcacaggctactttg

SEQ ID NO: 6332 - DNA, 15 bp, synthetic construct
  source 1..15: mol_type = other DNA
ggaacccagtgtgag

SEQ ID NO: 6333 - DNA, 15 bp, synthetic construct
  source 1..15: mol_type = other DNA
tcacaggctactttg

SEQ ID NO: 6334 - DNA, 15 bp, synthetic construct
  source 1..15: mol_type = other DNA
ggaacccagtgtgag

SEQ ID NO: 6335 - DNA, 15 bp, synthetic construct
  source 1..15: mol_type = other DNA
gtgatcagcattgag

SEQ ID NO: 6336 - DNA, 15 bp, synthetic construct
  source 1..15: mol_type = other DNA
aatggtttcattgag

SEQ ID NO: 6337 - DNA, 15 bp, synthetic construct
  source 1..15: mol_type = other DNA
atagccagcatagcc

SEQ ID NO: 6338 - DNA, 15 bp, synthetic construct
  source 1..15: mol_type = other DNA
taccacagaaggata

SEQ ID NO: 6339 - DNA, 15 bp, synthetic construct
  source 1..15: mol_type = other DNA
tctgtcacttcttct

SEQ ID NO: 6340 - DNA, 15 bp, synthetic construct
  source 1..15: mol_type = other DNA
tgatgagcaccacga

SEQ ID NO: 6341 - DNA, 15 bp, synthetic construct
  source 1..15: mol_type = other DNA
tggtttgccgtcctc

SEQ ID NO: 6342 - DNA, 15 bp, synthetic construct
  source 1..15: mol_type = other DNA
ggcacagcatagggt

SEQ ID NO: 6343 - DNA, 15 bp, synthetic construct
  source 1..15: mol_type = other DNA
catgggacttcctgc

SEQ ID NO: 6344 - DNA, 15 bp, synthetic construct
  source 1..15: mol_type = other DNA
ttccaggctgtagtc

SEQ ID NO: 6345 - DNA, 15 bp, synthetic construct
  source 1..15: mol_type = other DNA
gactcggactcggcg

SEQ ID NO: 6346 - DNA, 15 bp, synthetic construct
  source 1..15: mol_type = other DNA
cgggtactgctcggc

SEQ ID NO: 6347 - DNA, 15 bp, synthetic construct
  source 1..15: mol_type = other DNA
agcgtgtactcgcac

SEQ ID NO: 6348 - DNA, 15 bp, synthetic construct
  source 1..15: mol_type = other DNA
agcgcgatgtagcta

SEQ ID NO: 6349 - DNA, 15 bp, synthetic construct
  source 1..15: mol_type = other DNA
ccaaggacatggtga

SEQ ID NO: 6350 - DNA, 15 bp, synthetic construct
  source 1..15: mol_type = other DNA
tgttgtaggagtccg

SEQ ID NO: 6351 - DNA, 15 bp, synthetic construct
  source 1..15: mol_type = other DNA
aagggcagctactgg

SEQ ID NO: 6352 - DNA, 15 bp, synthetic construct
  source 1..15: mol_type = other DNA
gcacgtaccgttctc

SEQ ID NO: 6353 - DNA, 15 bp, synthetic construct
  source 1..15: mol_type = other DNA
tgcgcatccaggaca

SEQ ID NO: 6354 - DNA, 15 bp, synthetic construct
  source 1..15: mol_type = other DNA
gccctggctatggtg

SEQ ID NO: 6355 - DNA, 15 bp, synthetic construct
  source 1..15: mol_type = other DNA
gacggtgcggattcc

SEQ ID NO: 6356 - DNA, 15 bp, synthetic construct
  source 1..15: mol_type = other DNA
ggccgggcgagtagg

SEQ ID NO: 6357 - DNA, 15 bp, synthetic construct
  source 1..15: mol_type = other DNA
tcagctccggccttc

SEQ ID NO: 6358 - DNA, 15 bp, synthetic construct
  source 1..15: mol_type = other DNA
cgcgtacaggctcat

SEQ ID NO: 6359 - DNA, 15 bp, synthetic construct
  source 1..15: mol_type = other DNA
gacctaccactgcaa

SEQ ID NO: 6360 - DNA, 15 bp, synthetic construct
  source 1..15: mol_type = other DNA
gacgacgagctgctg

SEQ ID NO: 6361 - DNA, 15 bp, synthetic construct
  source 1..15: mol_type = other DNA
cccgactactctctg

SEQ ID NO: 6362 - DNA, 15 bp, synthetic construct
  source 1..15: mol_type = other DNA
ctctgtgactcgaac

SEQ ID NO: 6363 - DNA, 15 bp, synthetic construct
  source 1..15: mol_type = other DNA
agaacttccactcgg

SEQ ID NO: 6364 - DNA, 15 bp, synthetic construct
  source 1..15: mol_type = other DNA
ttgccttgatgggtt

SEQ ID NO: 6365 - DNA, 15 bp, synthetic construct
  source 1..15: mol_type = other DNA
tgacagtcgagaggg

SEQ ID NO: 6366 - DNA, 15 bp, synthetic construct
  source 1..15: mol_type = other DNA
cctcagcaacaaccc

SEQ ID NO: 6367 - DNA, 15 bp, synthetic construct
  source 1..15: mol_type = other DNA
ttgtcactgcttttg

SEQ ID NO: 6368 - DNA, 15 bp, synthetic construct
  source 1..15: mol_type = other DNA
agagttcaccgacct

SEQ ID NO: 6369 - DNA, 15 bp, synthetic construct
  source 1..15: mol_type = other DNA
gttgaagtgggtcaa

SEQ ID NO: 6370 - DNA, 15 bp, synthetic construct
  source 1..15: mol_type = other DNA
gggtcatgtcaggta

SEQ ID NO: 6371 - DNA, 15 bp, synthetic construct
  source 1..15: mol_type = other DNA
ttgacaacgagacac

SEQ ID NO: 6372 - DNA, 15 bp, synthetic construct
  source 1..15: mol_type = other DNA
aggatccccactctt

SEQ ID NO: 6373 - DNA, 15 bp, synthetic construct
  source 1..15: mol_type = other DNA
caactgacataaaat

SEQ ID NO: 6374 - DNA, 15 bp, synthetic construct
  source 1..15: mol_type = other DNA
ttctaaatccctttc

SEQ ID NO: 6375 - DNA, 15 bp, synthetic construct
  source 1..15: mol_type = other DNA
gctctacgctcttct

SEQ ID NO: 6376 - DNA, 15 bp, synthetic construct
  source 1..15: mol_type = other DNA
acctcgaagtacaag

SEQ ID NO: 6377 - DNA, 15 bp, synthetic construct
  source 1..15: mol_type = other DNA
acactcgggtggtga

SEQ ID NO: 6378 - DNA, 15 bp, synthetic construct
  source 1..15: mol_type = other DNA
atccctattaacaag

SEQ ID NO: 6379 - DNA, 15 bp, synthetic construct
  source 1..15: mol_type = other DNA
aacagaagacttcgt

SEQ ID NO: 6380 - DNA, 15 bp, synthetic construct
  source 1..15: mol_type = other DNA
cagagccacagaatt

SEQ ID NO: 6381 - DNA, 15 bp, synthetic construct
  source 1..15: mol_type = other DNA
ctgttctgtgcctat

SEQ ID NO: 6382 - DNA, 15 bp, synthetic construct
  source 1..15: mol_type = other DNA
attcatttccttttg

SEQ ID NO: 6383 - DNA, 15 bp, synthetic construct
  source 1..15: mol_type = other DNA
cgcaactactttgtg

SEQ ID NO: 6384 - DNA, 15 bp, synthetic construct
  source 1..15: mol_type = other DNA
ctcggagacctctcg

SEQ ID NO: 6385 - DNA, 15 bp, synthetic construct
  source 1..15: mol_type = other DNA
ggtaaggagtggatc

SEQ ID NO: 6386 - DNA, 15 bp, synthetic construct
  source 1..15: mol_type = other DNA
tacccccagtcgcaa

SEQ ID NO: 6387 - DNA, 15 bp, synthetic construct
  source 1..15: mol_type = other DNA
gacgtgggagtaagg

SEQ ID NO: 6388 - DNA, 15 bp, synthetic construct
  source 1..15: mol_type = other DNA
ggattttgtgtggat

SEQ ID NO: 6389 - DNA, 15 bp, synthetic construct
  source 1..15: mol_type = other DNA
tttagggatggaaaa

SEQ ID NO: 6390 - DNA, 15 bp, synthetic construct
  source 1..15: mol_type = other DNA
ccctgactcgttacc

SEQ ID NO: 6391 - DNA, 15 bp, synthetic construct
  source 1..15: mol_type = other DNA
ttcgggcgaatccga

SEQ ID NO: 6392 - DNA, 15 bp, synthetic construct
  source 1..15: mol_type = other DNA
tagctccacttgggt

SEQ ID NO: 6393 - DNA, 15 bp, synthetic construct
  source 1..15: mol_type = other DNA
tgtcttcgctgtctc

SEQ ID NO: 6394 - DNA, 15 bp, synthetic construct
  source 1..15: mol_type = other DNA
gccgcgatgtccata

SEQ ID NO: 6395 - DNA, 15 bp, synthetic construct
  source 1..15: mol_type = other DNA
cccattttggcaagt

SEQ ID NO: 6396 - DNA, 15 bp, synthetic construct
  source 1..15: mol_type = other DNA
ataaatccatcactt

SEQ ID NO: 6397 - DNA, 15 bp, synthetic construct
  source 1..15: mol_type = other DNA
tacattttcaggctt

SEQ ID NO: 6398 - DNA, 15 bp, synthetic construct
  source 1..15: mol_type = other DNA
aacgacataaaagtt

SEQ ID NO: 6399 - DNA, 15 bp, synthetic construct
  source 1..15: mol_type = other DNA
tctcaagacaacgta

SEQ ID NO: 6400 - DNA, 15 bp, synthetic construct
  source 1..15: mol_type = other DNA
gagtatttttaaaag

SEQ ID NO: 6401 - DNA, 15 bp, synthetic construct
  source 1..15: mol_type = other DNA
ttttctagaacccag

SEQ ID NO: 6402 - DNA, 15 bp, synthetic construct
  source 1..15: mol_type = other DNA
acaaatattggcaaa

SEQ ID NO: 6403 - DNA, 15 bp, synthetic construct
  source 1..15: mol_type = other DNA
aactacactgtgtcc

SEQ ID NO: 6404 - DNA, 15 bp, synthetic construct
  source 1..15: mol_type = other DNA
ccctatgaacctgaa

SEQ ID NO: 6405 - DNA, 15 bp, synthetic construct
  source 1..15: mol_type = other DNA
accatagtgtcacat

SEQ ID NO: 6406 - DNA, 15 bp, synthetic construct
  source 1..15: mol_type = other DNA
accaaacagctgaat

SEQ ID NO: 6407 - DNA, 15 bp, synthetic construct
  source 1..15: mol_type = other DNA
agcaaaagcaataga

SEQ ID NO: 6408 - DNA, 15 bp, synthetic construct
  source 1..15: mol_type = other DNA
tcaggaatgaatggt

SEQ ID NO: 6409 - DNA, 15 bp, synthetic construct
  source 1..15: mol_type = other DNA
agaatctcctcgact

SEQ ID NO: 6410 - DNA, 15 bp, synthetic construct
  source 1..15: mol_type = other DNA
tgcagtggaaatgtt

SEQ ID NO: 6411 - DNA, 15 bp, synthetic construct
  source 1..15: mol_type = other DNA
accttagagggttta

SEQ ID NO: 6412 - DNA, 15 bp, synthetic construct
  source 1..15: mol_type = other DNA
ggattttgattttca

SEQ ID NO: 6413 - DNA, 15 bp, synthetic construct
  source 1..15: mol_type = other DNA
aatggatctatttaa

SEQ ID NO: 6414 - DNA, 15 bp, synthetic construct
  source 1..15: mol_type = other DNA
ctttgccatttaggg

SEQ ID NO: 6415 - DNA, 15 bp, synthetic construct
  source 1..15: mol_type = other DNA
tatttggaatggttt

SEQ ID NO: 6416 - DNA, 15 bp, synthetic construct
  source 1..15: mol_type = other DNA
cttaccagtagttaa

SEQ ID NO: 6417 - DNA, 15 bp, synthetic construct
  source 1..15: mol_type = other DNA
taagttttatctctt

SEQ ID NO: 6418 - DNA, 15 bp, synthetic construct
  source 1..15: mol_type = other DNA
gcagtaaacagttga

SEQ ID NO: 6419 - DNA, 15 bp, synthetic construct
  source 1..15: mol_type = other DNA
gtcagcaaaagaccc

SEQ ID NO: 6420 - DNA, 15 bp, synthetic construct
  source 1..15: mol_type = other DNA
catattttcgacagg

SEQ ID NO: 6421 - DNA, 15 bp, synthetic construct
  source 1..15: mol_type = other DNA
gcccattctccaact

SEQ ID NO: 6422 - DNA, 15 bp, synthetic construct
  source 1..15: mol_type = other DNA
ataactttgaggcat

SEQ ID NO: 6423 - DNA, 15 bp, synthetic construct
  source 1..15: mol_type = other DNA
aatatcttcaacaat

SEQ ID NO: 6424 - DNA, 15 bp, synthetic construct
  source 1..15: mol_type = other DNA
ggtttggaatttgtg

SEQ ID NO: 6425 - DNA, 15 bp, synthetic construct
  source 1..15: mol_type = other DNA
aattttaacttgaag

SEQ ID NO: 6426 - DNA, 15 bp, synthetic construct
  source 1..15: mol_type = other DNA
aatgctgagaaaagc

SEQ ID NO: 6427 - DNA, 15 bp, synthetic construct
  source 1..15: mol_type = other DNA
agaatgccgtccaaa

SEQ ID NO: 6428 - DNA, 15 bp, synthetic construct
  source 1..15: mol_type = other DNA
ataaaagcaactctt

SEQ ID NO: 6429 - DNA, 15 bp, synthetic construct
  source 1..15: mol_type = other DNA
tcttcatatcaaccc

SEQ ID NO: 6430 - DNA, 15 bp, synthetic construct
  source 1..15: mol_type = other DNA
atccatgagaagaag

SEQ ID NO: 6431 - DNA, 15 bp, synthetic construct
  source 1..15: mol_type = other DNA
gaagacttcgaagct

SEQ ID NO: 6432 - DNA, 15 bp, synthetic construct
  source 1..15: mol_type = other DNA
tcagtttctcgttcg

SEQ ID NO: 6433 - DNA, 15 bp, synthetic construct
  source 1..15: mol_type = other DNA
cccttccctttgtga

SEQ ID NO: 6434 - DNA, 15 bp, synthetic construct
  source 1..15: mol_type = other DNA
gtcagcgtgggaaga

SEQ ID NO: 6435 - DNA, 15 bp, synthetic construct
  source 1..15: mol_type = other DNA
tttaatctatttttc

SEQ ID NO: 6436 - DNA, 15 bp, synthetic construct
  source 1..15: mol_type = other DNA
attgcagtagcctag

SEQ ID NO: 6437 - DNA, 15 bp, synthetic construct
  source 1..15: mol_type = other DNA
taccctcattgtgtg

SEQ ID NO: 6438 - DNA, 15 bp, synthetic construct
  source 1..15: mol_type = other DNA
gaactacacattaca

SEQ ID NO: 6439 - DNA, 15 bp, synthetic construct
  source 1..15: mol_type = other DNA
ccaggtctaggtctg

SEQ ID NO: 6440 - DNA, 15 bp, synthetic construct
  source 1..15: mol_type = other DNA
gaaaggctgatgaag

SEQ ID NO: 6441 - DNA, 15 bp, synthetic construct
  source 1..15: mol_type = other DNA
gtaagcgagggtaac

SEQ ID NO: 6442 - DNA, 15 bp, synthetic construct
  source 1..15: mol_type = other DNA
ctgcaggtacgtgtc

SEQ ID NO: 6443 - DNA, 15 bp, synthetic construct
  source 1..15: mol_type = other DNA
acgtgtgtccttctg

SEQ ID NO: 6444 - DNA, 15 bp, synthetic construct
  source 1..15: mol_type = other DNA
taaaactgctcctac

SEQ ID NO: 6445 - DNA, 15 bp, synthetic construct
  source 1..15: mol_type = other DNA
tccatatgggttgag

SEQ ID NO: 6446 - DNA, 15 bp, synthetic construct
  source 1..15: mol_type = other DNA
gtgtaaccgtcatag

SEQ ID NO: 6447 - DNA, 15 bp, synthetic construct
  source 1..15: mol_type = other DNA
actacaatgtgagtg

SEQ ID NO: 6448 - DNA, 15 bp, synthetic construct
  source 1..15: mol_type = other DNA
agagagcaagagtta

SEQ ID NO: 6449 - DNA, 15 bp, synthetic construct
  source 1..15: mol_type = other DNA
tgcttacctcgatgt

SEQ ID NO: 6450 - DNA, 15 bp, synthetic construct
  source 1..15: mol_type = other DNA
agtaggatggaagac

SEQ ID NO: 6451 - DNA, 15 bp, synthetic construct
  source 1..15: mol_type = other DNA
ataccctggaaaccc

SEQ ID NO: 6452 - DNA, 15 bp, synthetic construct
  source 1..15: mol_type = other DNA
tgtcccttctccatt

SEQ ID NO: 6453 - DNA, 15 bp, synthetic construct
  source 1..15: mol_type = other DNA
gacagagaccataga

SEQ ID NO: 6454 - DNA, 15 bp, synthetic construct
  source 1..15: mol_type = other DNA
tggctcctgtgaagt

SEQ ID NO: 6455 - DNA, 15 bp, synthetic construct
  source 1..15: mol_type = other DNA
gacagagaccataga

SEQ ID NO: 6456 - DNA, 15 bp, synthetic construct
  source 1..15: mol_type = other DNA
tggctcctgtgaagt

SEQ ID NO: 6457 - DNA, 15 bp, synthetic construct
  source 1..15: mol_type = other DNA
ctacctggtgctaga

SEQ ID NO: 6458 - DNA, 15 bp, synthetic construct
  source 1..15: mol_type = other DNA
gaggaattaccagtc

SEQ ID NO: 6459 - DNA, 15 bp, synthetic construct
  source 1..15: mol_type = other DNA
aggtcctattctgtc

SEQ ID NO: 6460 - DNA, 15 bp, synthetic construct
  source 1..15: mol_type = other DNA
actttgacccaaatt

SEQ ID NO: 6461 - DNA, 15 bp, synthetic construct
  source 1..15: mol_type = other DNA
agttatggtgtgaag

SEQ ID NO: 6462 - DNA, 15 bp, synthetic construct
  source 1..15: mol_type = other DNA
aaagtggtcctccct

SEQ ID NO: 6463 - DNA, 15 bp, synthetic construct
  source 1..15: mol_type = other DNA
tgtgggatttcagtt

SEQ ID NO: 6464 - DNA, 15 bp, synthetic construct
  source 1..15: mol_type = other DNA
gaggtcccttctgac

SEQ ID NO: 6465 - DNA, 15 bp, synthetic construct
  source 1..15: mol_type = other DNA
gactaacaccaagaa

SEQ ID NO: 6466 - DNA, 15 bp, synthetic construct
  source 1..15: mol_type = other DNA
gtcacaggagagatg

SEQ ID NO: 6467 - DNA, 15 bp, synthetic construct
  source 1..15: mol_type = other DNA
ctttagccagtttat

SEQ ID NO: 6468 - DNA, 15 bp, synthetic construct
  source 1..15: mol_type = other DNA
catagacatctgagg

SEQ ID NO: 6469 - DNA, 15 bp, synthetic construct
  source 1..15: mol_type = other DNA
tatctgggtgagtaa

SEQ ID NO: 6470 - DNA, 15 bp, synthetic construct
  source 1..15: mol_type = other DNA
agagttgtgttcttt

SEQ ID NO: 6471 - DNA, 15 bp, synthetic construct
  source 1..15: mol_type = other DNA
aagtgttccgagttt

SEQ ID NO: 6472 - DNA, 15 bp, synthetic construct
  source 1..15: mol_type = other DNA
gagggaaagctcaac

SEQ ID NO: 6473 - DNA, 15 bp, synthetic construct
  source 1..15: mol_type = other DNA
tggtttgtgaaagtt

SEQ ID NO: 6474 - DNA, 15 bp, synthetic construct
  source 1..15: mol_type = other DNA
aggatctgtagaaag

SEQ ID NO: 6475 - DNA, 15 bp, synthetic construct
  source 1..15: mol_type = other DNA
aagttaggaatgaca

SEQ ID NO: 6476 - DNA, 15 bp, synthetic construct
  source 1..15: mol_type = other DNA
tagtctggccatatt

SEQ ID NO: 6477 - DNA, 15 bp, synthetic construct
  source 1..15: mol_type = other DNA
acgttgccctgatca

SEQ ID NO: 6478 - DNA, 15 bp, synthetic construct
  source 1..15: mol_type = other DNA
atccttatcctcttg

SEQ ID NO: 6479 - DNA, 15 bp, synthetic construct
  source 1..15: mol_type = other DNA
acgttgccctgatca

SEQ ID NO: 6480 - DNA, 15 bp, synthetic construct
  source 1..15: mol_type = other DNA
atccttatcctcttg

SEQ ID NO: 6481 - DNA, 15 bp, synthetic construct
  source 1..15: mol_type = other DNA
ctagaagggcttagg

SEQ ID NO: 6482 - DNA, 15 bp, synthetic construct
  source 1..15: mol_type = other DNA
gaagtggcttaggaa

SEQ ID NO: 6483 - DNA, 15 bp, synthetic construct
  source 1..15: mol_type = other DNA
ggtctacatcaagaa

SEQ ID NO: 6484 - DNA, 15 bp, synthetic construct
  source 1..15: mol_type = other DNA
cacctctgcaagtat

SEQ ID NO: 6485 - DNA, 15 bp, synthetic construct
  source 1..15: mol_type = other DNA
ggtctacatcaagaa

SEQ ID NO: 6486 - DNA, 15 bp, synthetic construct
  source 1..15: mol_type = other DNA
cacctctgcaagtat

SEQ ID NO: 6487 - DNA, 15 bp, synthetic construct
  source 1..15: mol_type = other DNA
tggaggagtgagtcc

SEQ ID NO: 6488 - DNA, 15 bp, synthetic construct
  source 1..15: mol_type = other DNA
tagccacatgcattg

SEQ ID NO: 6489 - DNA, 15 bp, synthetic construct
  source 1..15: mol_type = other DNA
tggaggagtgagtcc

SEQ ID NO: 6490 - DNA, 15 bp, synthetic construct
  source 1..15: mol_type = other DNA
tagccacatgcattg

SEQ ID NO: 6491 - DNA, 15 bp, synthetic construct
  source 1..15: mol_type = other DNA
tgcttccaggattag

SEQ ID NO: 6492 - DNA, 15 bp, synthetic construct
  source 1..15: mol_type = other DNA
tgttttaattcaatc

SEQ ID NO: 6493 - DNA, 15 bp, synthetic construct
  source 1..15: mol_type = other DNA
tggctcttctctcgg

SEQ ID NO: 6494 - DNA, 15 bp, synthetic construct
  source 1..15: mol_type = other DNA
gttggttgagtgctg

SEQ ID NO: 6495 - DNA, 15 bp, synthetic construct
  source 1..15: mol_type = other DNA
tctgccgcagaggat

SEQ ID NO: 6496 - DNA, 15 bp, synthetic construct
  source 1..15: mol_type = other DNA
cctggtggtacagga

SEQ ID NO: 6497 - DNA, 15 bp, synthetic construct
  source 1..15: mol_type = other DNA
gtccctgtgaggcac

SEQ ID NO: 6498 - DNA, 15 bp, synthetic construct
  source 1..15: mol_type = other DNA
gaacgtgttttggga

SEQ ID NO: 6499 - DNA, 15 bp, synthetic construct
  source 1..15: mol_type = other DNA
gtccctgtgaggcac

SEQ ID NO: 6500 - DNA, 15 bp, synthetic construct
  source 1..15: mol_type = other DNA
gaacgtgttttggga

SEQ ID NO: 6501 - DNA, 15 bp, synthetic construct
  source 1..15: mol_type = other DNA
cgcccccatcagtct

SEQ ID NO: 6502 - DNA, 15 bp, synthetic construct
  source 1..15: mol_type = other DNA
cctgccgcccgtgtc

SEQ ID NO: 6503 - DNA, 15 bp, synthetic construct
  source 1..15: mol_type = other DNA
cgcccccatcagtct

SEQ ID NO: 6504 - DNA, 15 bp, synthetic construct
  source 1..15: mol_type = other DNA
cctgccgcccgtgtc

SEQ ID NO: 6505 - DNA, 15 bp, synthetic construct
  source 1..15: mol_type = other DNA
tccagtgcagcacgg

SEQ ID NO: 6506 - DNA, 15 bp, synthetic construct
  source 1..15: mol_type = other DNA
gtgtgcaggtggacg

SEQ ID NO: 6507 - DNA, 15 bp, synthetic construct
  source 1..15: mol_type = other DNA
tccagtgcagcacgg

SEQ ID NO: 6508 - DNA, 15 bp, synthetic construct
  source 1..15: mol_type = other DNA
gtgtgcaggtggacg

SEQ ID NO: 6509 - DNA, 15 bp, synthetic construct
  source 1..15: mol_type = other DNA
ccccagactccactg

SEQ ID NO: 6510 - DNA, 15 bp, synthetic construct
  source 1..15: mol_type = other DNA
tttgccatgtgctca

SEQ ID NO: 6511 - DNA, 15 bp, synthetic construct
  source 1..15: mol_type = other DNA
ggtgggcagagtgca

SEQ ID NO: 6512 - DNA, 15 bp, synthetic construct
  source 1..15: mol_type = other DNA
gctggagcagaggcg

SEQ ID NO: 6513 - DNA, 15 bp, synthetic construct
  source 1..15: mol_type = other DNA
agaactgcagagggg

SEQ ID NO: 6514 - DNA, 15 bp, synthetic construct
  source 1..15: mol_type = other DNA
ccctcagcccaggta

SEQ ID NO: 6515 - DNA, 15 bp, synthetic construct
  source 1..15: mol_type = other DNA
tcccttctgagtcct

SEQ ID NO: 6516 - DNA, 15 bp, synthetic construct
  source 1..15: mol_type = other DNA
agactccatgcgcct

SEQ ID NO: 6517 - DNA, 15 bp, synthetic construct
  source 1..15: mol_type = other DNA
ggagacgcctggtgg

SEQ ID NO: 6518 - DNA, 15 bp, synthetic construct
  source 1..15: mol_type = other DNA
gagtgctgaccgtga

SEQ ID NO: 6519 - DNA, 15 bp, synthetic construct
  source 1..15: mol_type = other DNA
tggctcttctctcgg

SEQ ID NO: 6520 - DNA, 15 bp, synthetic construct
  source 1..15: mol_type = other DNA
gttggttgagtgctg

SEQ ID NO: 6521 - DNA, 15 bp, synthetic construct
  source 1..15: mol_type = other DNA
ccgctgcagaggatt

SEQ ID NO: 6522 - DNA, 15 bp, synthetic construct
  source 1..15: mol_type = other DNA
cctggtggtacagga

SEQ ID NO: 6523 - DNA, 15 bp, synthetic construct
  source 1..15: mol_type = other DNA
cgtagttccccagtc

SEQ ID NO: 6524 - DNA, 15 bp, synthetic construct
  source 1..15: mol_type = other DNA
ctgaacgtgttttgc

SEQ ID NO: 6525 - DNA, 15 bp, synthetic construct
  source 1..15: mol_type = other DNA
cgtagttccccagtc

SEQ ID NO: 6526 - DNA, 15 bp, synthetic construct
  source 1..15: mol_type = other DNA
ctgaacgtgttttgc

SEQ ID NO: 6527 - DNA, 15 bp, synthetic construct
  source 1..15: mol_type = other DNA
cgcccccatcagtct

SEQ ID NO: 6528 - DNA, 15 bp, synthetic construct
  source 1..15: mol_type = other DNA
cctgccgcccgtgtc

SEQ ID NO: 6529 - DNA, 15 bp, synthetic construct
  source 1..15: mol_type = other DNA
cgcccccatcagtct

SEQ ID NO: 6530 - DNA, 15 bp, synthetic construct
  source 1..15: mol_type = other DNA
cctgccgcccgtgtc

SEQ ID NO: 6531 - DNA, 15 bp, synthetic construct
  source 1..15: mol_type = other DNA
tccagtgcagcacgg

SEQ ID NO: 6532 - DNA, 15 bp, synthetic construct
  source 1..15: mol_type = other DNA
cctcaccacgggtga

SEQ ID NO: 6533 - DNA, 15 bp, synthetic construct
  source 1..15: mol_type = other DNA
tccagtgcagcacgg

SEQ ID NO: 6534 - DNA, 15 bp, synthetic construct
  source 1..15: mol_type = other DNA
cctcaccacgggtga

SEQ ID NO: 6535 - DNA, 15 bp, synthetic construct
  source 1..15: mol_type = other DNA
tgccgttttcttggc

SEQ ID NO: 6536 - DNA, 15 bp, synthetic construct
  source 1..15: mol_type = other DNA
ccctcgatccccaat

SEQ ID NO: 6537 - DNA, 15 bp, synthetic construct
  source 1..15: mol_type = other DNA
ggtgggcagagtgca

SEQ ID NO: 6538 - DNA, 15 bp, synthetic construct
  source 1..15: mol_type = other DNA
gctggagcagaggcg

SEQ ID NO: 6539 - DNA, 15 bp, synthetic construct
  source 1..15: mol_type = other DNA
agaactgcagagggg

SEQ ID NO: 6540 - DNA, 15 bp, synthetic construct
  source 1..15: mol_type = other DNA
ccctcagcccaggta

SEQ ID NO: 6541 - DNA, 15 bp, synthetic construct
  source 1..15: mol_type = other DNA
tcccttctgagtcct

SEQ ID NO: 6542 - DNA, 15 bp, synthetic construct
  source 1..15: mol_type = other DNA
agactccatgcgcct

SEQ ID NO: 6543 - DNA, 15 bp, synthetic construct
  source 1..15: mol_type = other DNA
ggcgcttcccttcat

SEQ ID NO: 6544 - DNA, 15 bp, synthetic construct
  source 1..15: mol_type = other DNA
tgagcctcctgaaga

SEQ ID NO: 6545 - DNA, 15 bp, synthetic construct
  source 1..15: mol_type = other DNA
tgtcttcagcccaaa

SEQ ID NO: 6546 - DNA, 15 bp, synthetic construct
  source 1..15: mol_type = other DNA
cgtggtccagtacag

SEQ ID NO: 6547 - DNA, 15 bp, synthetic construct
  source 1..15: mol_type = other DNA
tttcttgccaggctc

SEQ ID NO: 6548 - DNA, 15 bp, synthetic construct
  source 1..15: mol_type = other DNA
gtgactaagagcttt

SEQ ID NO: 6549 - DNA, 15 bp, synthetic construct
  source 1..15: mol_type = other DNA
gaagtaatgcatatg

SEQ ID NO: 6550 - DNA, 15 bp, synthetic construct
  source 1..15: mol_type = other DNA
gtaggaaatacaggt

SEQ ID NO: 6551 - DNA, 15 bp, synthetic construct
  source 1..15: mol_type = other DNA
cctgacagaccatag

SEQ ID NO: 6552 - DNA, 15 bp, synthetic construct
  source 1..15: mol_type = other DNA
gactccttcgtggtc

SEQ ID NO: 6553 - DNA, 15 bp, synthetic construct
  source 1..15: mol_type = other DNA
cgaccatccttatcc

SEQ ID NO: 6554 - DNA, 15 bp, synthetic construct
  source 1..15: mol_type = other DNA
actcctggcccagtc

SEQ ID NO: 6555 - DNA, 15 bp, synthetic construct
  source 1..15: mol_type = other DNA
acaggtgccacaagg

SEQ ID NO: 6556 - DNA, 15 bp, synthetic construct
  source 1..15: mol_type = other DNA
cctctcatggacggt

SEQ ID NO: 6557 - DNA, 15 bp, synthetic construct
  source 1..15: mol_type = other DNA
tactgtaccaggaag

SEQ ID NO: 6558 - DNA, 15 bp, synthetic construct
  source 1..15: mol_type = other DNA
cacagattctaaaac

SEQ ID NO: 6559 - DNA, 15 bp, synthetic construct
  source 1..15: mol_type = other DNA
cagatcacaatggga

SEQ ID NO: 6560 - DNA, 15 bp, synthetic construct
  source 1..15: mol_type = other DNA
cccagtgtccaccgt

SEQ ID NO: 6561 - DNA, 15 bp, synthetic construct
  source 1..15: mol_type = other DNA
cactcacccgtgatg

SEQ ID NO: 6562 - DNA, 15 bp, synthetic construct
  source 1..15: mol_type = other DNA
ttgacagtgacagga

SEQ ID NO: 6563 - DNA, 15 bp, synthetic construct
  source 1..15: mol_type = other DNA
gaaggagtcgaagcg

SEQ ID NO: 6564 - DNA, 15 bp, synthetic construct
  source 1..15: mol_type = other DNA
acttctctgaaatga

SEQ ID NO: 6565 - DNA, 15 bp, synthetic construct
  source 1..15: mol_type = other DNA
cagcaaaactcctga

SEQ ID NO: 6566 - DNA, 15 bp, synthetic construct
  source 1..15: mol_type = other DNA
gtggccagcgcgtag

SEQ ID NO: 6567 - DNA, 15 bp, synthetic construct
  source 1..15: mol_type = other DNA
tcactcacccgtcac

SEQ ID NO: 6568 - DNA, 15 bp, synthetic construct
  source 1..15: mol_type = other DNA
tgccacccccgactc

SEQ ID NO: 6569 - DNA, 15 bp, synthetic construct
  source 1..15: mol_type = other DNA
ccctcgggaaccatc

SEQ ID NO: 6570 - DNA, 15 bp, synthetic construct
  source 1..15: mol_type = other DNA
gcagcatcgtcctgt

SEQ ID NO: 6571 - DNA, 15 bp, synthetic construct
  source 1..15: mol_type = other DNA
tttcacgaagactgg

SEQ ID NO: 6572 - DNA, 15 bp, synthetic construct
  source 1..15: mol_type = other DNA
ttcgactccttcact

SEQ ID NO: 6573 - DNA, 15 bp, synthetic construct
  source 1..15: mol_type = other DNA
atcttgtatttgcac

SEQ ID NO: 6574 - DNA, 15 bp, synthetic construct
  source 1..15: mol_type = other DNA
cagaggaagaaactc

SEQ ID NO: 6575 - DNA, 15 bp, synthetic construct
  source 1..15: mol_type = other DNA
tccgtgctgggttct

SEQ ID NO: 6576 - DNA, 15 bp, synthetic construct
  source 1..15: mol_type = other DNA
ctgtgagctctgttg

SEQ ID NO: 6577 - DNA, 15 bp, synthetic construct
  source 1..15: mol_type = other DNA
gctcagccaagagca

SEQ ID NO: 6578 - DNA, 15 bp, synthetic construct
  source 1..15: mol_type = other DNA
cagtacaggaatggg

SEQ ID NO: 6579 - DNA, 15 bp, synthetic construct
  source 1..15: mol_type = other DNA
gtggtctggctccag

SEQ ID NO: 6580 - DNA, 15 bp, synthetic construct
  source 1..15: mol_type = other DNA
cacgtgtctgtccag

SEQ ID NO: 6581 - DNA, 15 bp, synthetic construct
  source 1..15: mol_type = other DNA
ttgttttcatgaagt

SEQ ID NO: 6582 - DNA, 15 bp, synthetic construct
  source 1..15: mol_type = other DNA
gggccacttcgactc

SEQ ID NO: 6583 - DNA, 15 bp, synthetic construct
  source 1..15: mol_type = other DNA
cccctgacacgcatc

SEQ ID NO: 6584 - DNA, 15 bp, synthetic construct
  source 1..15: mol_type = other DNA
aagacctgagcacat

SEQ ID NO: 6585 - DNA, 15 bp, synthetic construct
  source 1..15: mol_type = other DNA
cagggtcagctgtgg

SEQ ID NO: 6586 - DNA, 15 bp, synthetic construct
  source 1..15: mol_type = other DNA
gggccccatctctgt

SEQ ID NO: 6587 - DNA, 15 bp, synthetic construct
  source 1..15: mol_type = other DNA
gccatcatccactca

SEQ ID NO: 6588 - DNA, 15 bp, synthetic construct
  source 1..15: mol_type = other DNA
cctgtcctggacggt

SEQ ID NO: 6589 - DNA, 15 bp, synthetic construct
  source 1..15: mol_type = other DNA
accccgtcctcgtgc

SEQ ID NO: 6590 - DNA, 15 bp, synthetic construct
  source 1..15: mol_type = other DNA
ctgaggagccaggga

SEQ ID NO: 6591 - DNA, 15 bp, synthetic construct
  source 1..15: mol_type = other DNA
ttctagggctgtctt

SEQ ID NO: 6592 - DNA, 15 bp, synthetic construct
  source 1..15: mol_type = other DNA
cctttcctggaccgt

SEQ ID NO: 6593 - DNA, 15 bp, synthetic construct
  source 1..15: mol_type = other DNA
cggtgaaggagtcaa

SEQ ID NO: 6594 - DNA, 15 bp, synthetic construct
  source 1..15: mol_type = other DNA
acctctgttgacagc

SEQ ID NO: 6595 - DNA, 15 bp, synthetic construct
  source 1..15: mol_type = other DNA
aaaccaggtacccat

SEQ ID NO: 6596 - DNA, 15 bp, synthetic construct
  source 1..15: mol_type = other DNA
cctctcctggaccgt

SEQ ID NO: 6597 - DNA, 15 bp, synthetic construct
  source 1..15: mol_type = other DNA
ctcgcccccaacacg

SEQ ID NO: 6598 - DNA, 15 bp, synthetic construct
  source 1..15: mol_type = other DNA
acgtaagcacatccc

SEQ ID NO: 6599 - DNA, 15 bp, synthetic construct
  source 1..15: mol_type = other DNA
caaaaaggtacaatg

SEQ ID NO: 6600 - DNA, 15 bp, synthetic construct
  source 1..15: mol_type = other DNA
cagggtcaccatctc

SEQ ID NO: 6601 - DNA, 15 bp, synthetic construct
  source 1..15: mol_type = other DNA
tgtacttgttgtctg

SEQ ID NO: 6602 - DNA, 15 bp, synthetic construct
  source 1..15: mol_type = other DNA
aaggatgaagaaatg

SEQ ID NO: 6603 - DNA, 15 bp, synthetic construct
  source 1..15: mol_type = other DNA
cacggtcagctcctc

SEQ ID NO: 6604 - DNA, 15 bp, synthetic construct
  source 1..15: mol_type = other DNA
tggtgttaactgaac

SEQ ID NO: 6605 - DNA, 15 bp, synthetic construct
  source 1..15: mol_type = other DNA
ctgacaataaaaggg

SEQ ID NO: 6606 - DNA, 15 bp, synthetic construct
  source 1..15: mol_type = other DNA
ttgaccatttcttgg

SEQ ID NO: 6607 - DNA, 15 bp, synthetic construct
  source 1..15: mol_type = other DNA
taaaccaacagcaga

SEQ ID NO: 6608 - DNA, 15 bp, synthetic construct
  source 1..15: mol_type = other DNA
gcaaagctgcgccta

SEQ ID NO: 6609 - DNA, 15 bp, synthetic construct
  source 1..15: mol_type = other DNA
ggaggtgatgtctct

SEQ ID NO: 6610 - DNA, 15 bp, synthetic construct
  source 1..15: mol_type = other DNA
aagccacaaaatctg

SEQ ID NO: 6611 - DNA, 15 bp, synthetic construct
  source 1..15: mol_type = other DNA
ctgagcctttagtga

SEQ ID NO: 6612 - DNA, 15 bp, synthetic construct
  source 1..15: mol_type = other DNA
caggtggtgcgtgtt

SEQ ID NO: 6613 - DNA, 15 bp, synthetic construct
  source 1..15: mol_type = other DNA
ccacggtgacttcac

SEQ ID NO: 6614 - DNA, 15 bp, synthetic construct
  source 1..15: mol_type = other DNA
aggacatccccctca

SEQ ID NO: 6615 - DNA, 15 bp, synthetic construct
  source 1..15: mol_type = other DNA
acccttgtcccattc

SEQ ID NO: 6616 - DNA, 15 bp, synthetic construct
  source 1..15: mol_type = other DNA
agtacaggaatggag

SEQ ID NO: 6617 - DNA, 15 bp, synthetic construct
  source 1..15: mol_type = other DNA
gatggtgaccccttc

SEQ ID NO: 6618 - DNA, 15 bp, synthetic construct
  source 1..15: mol_type = other DNA
cctcagtcctctctt

SEQ ID NO: 6619 - DNA, 15 bp, synthetic construct
  source 1..15: mol_type = other DNA
gaaagagaggactga

SEQ ID NO: 6620 - DNA, 15 bp, synthetic construct
  source 1..15: mol_type = other DNA
atagagacgggcaac

SEQ ID NO: 6621 - DNA, 15 bp, synthetic construct
  source 1..15: mol_type = other DNA
ccggtcacctcctat

SEQ ID NO: 6622 - DNA, 15 bp, synthetic construct
  source 1..15: mol_type = other DNA
tacctgtctctgtga

SEQ ID NO: 6623 - DNA, 15 bp, synthetic construct
  source 1..15: mol_type = other DNA
atcttatggctcagt

SEQ ID NO: 6624 - DNA, 15 bp, synthetic construct
  source 1..15: mol_type = other DNA
tttgactcctttgtg

SEQ ID NO: 6625 - DNA, 15 bp, synthetic construct
  source 1..15: mol_type = other DNA
tctttgtactggacc

SEQ ID NO: 6626 - DNA, 15 bp, synthetic construct
  source 1..15: mol_type = other DNA
ccagacctctcaatc

SEQ ID NO: 6627 - DNA, 15 bp, synthetic construct
  source 1..15: mol_type = other DNA
taatggtaatggcag

SEQ ID NO: 6628 - DNA, 15 bp, synthetic construct
  source 1..15: mol_type = other DNA
cagttcaaggacaaa

SEQ ID NO: 6629 - DNA, 15 bp, synthetic construct
  source 1..15: mol_type = other DNA
ggaatctgtacttgc

SEQ ID NO: 6630 - DNA, 15 bp, synthetic construct
  source 1..15: mol_type = other DNA
aacctttcctctcca

SEQ ID NO: 6631 - DNA, 15 bp, synthetic construct
  source 1..15: mol_type = other DNA
aagagtcgaactggc

SEQ ID NO: 6632 - DNA, 15 bp, synthetic construct
  source 1..15: mol_type = other DNA
gatggaaatattttg

SEQ ID NO: 6633 - DNA, 15 bp, synthetic construct
  source 1..15: mol_type = other DNA
ttttcaaatgagaca

SEQ ID NO: 6634 - DNA, 15 bp, synthetic construct
  source 1..15: mol_type = other DNA
tccctgacctggaac

SEQ ID NO: 6635 - DNA, 15 bp, synthetic construct
  source 1..15: mol_type = other DNA
gatcccaaagagcag

SEQ ID NO: 6636 - DNA, 15 bp, synthetic construct
  source 1..15: mol_type = other DNA
acagtgacggatata

SEQ ID NO: 6637 - DNA, 15 bp, synthetic construct
  source 1..15: mol_type = other DNA
aggagtcgaattcac

SEQ ID NO: 6638 - DNA, 15 bp, synthetic construct
  source 1..15: mol_type = other DNA
tggaagtaaaggtgt

SEQ ID NO: 6639 - DNA, 15 bp, synthetic construct
  source 1..15: mol_type = other DNA
agatgaggactgagt

SEQ ID NO: 6640 - DNA, 15 bp, synthetic construct
  source 1..15: mol_type = other DNA
ttgactccttcatag

SEQ ID NO: 6641 - DNA, 15 bp, synthetic construct
  source 1..15: mol_type = other DNA
ggctccaggttgtag

SEQ ID NO: 6642 - DNA, 15 bp, synthetic construct
  source 1..15: mol_type = other DNA
ctaacagccccctac

SEQ ID NO: 6643 - DNA, 15 bp, synthetic construct
  source 1..15: mol_type = other DNA
agagcaactggctac

SEQ ID NO: 6644 - DNA, 15 bp, synthetic construct
  source 1..15: mol_type = other DNA
cagcttcgactcttt

SEQ ID NO: 6645 - DNA, 15 bp, synthetic construct
  source 1..15: mol_type = other DNA
acggtgacctcactc

SEQ ID NO: 6646 - DNA, 15 bp, synthetic construct
  source 1..15: mol_type = other DNA
tttatgcctctatct

SEQ ID NO: 6647 - DNA, 15 bp, synthetic construct
  source 1..15: mol_type = other DNA
aatgagctgagaagg

SEQ ID NO: 6648 - DNA, 15 bp, synthetic construct
  source 1..15: mol_type = other DNA
cccgaccggaagtat

SEQ ID NO: 6649 - DNA, 15 bp, synthetic construct
  source 1..15: mol_type = other DNA
cccgtagaggttcat

SEQ ID NO: 6650 - DNA, 15 bp, synthetic construct
  source 1..15: mol_type = other DNA
gctccagagaggaaa

SEQ ID NO: 6651 - DNA, 15 bp, synthetic construct
  source 1..15: mol_type = other DNA
tggaccatgaatgag

SEQ ID NO: 6652 - DNA, 15 bp, synthetic construct
  source 1..15: mol_type = other DNA
aatggactagtgacc

SEQ ID NO: 6653 - DNA, 15 bp, synthetic construct
  source 1..15: mol_type = other DNA
ctgaagggaagtgtg

SEQ ID NO: 6654 - DNA, 15 bp, synthetic construct
  source 1..15: mol_type = other DNA
ttgacaccttcatgg

SEQ ID NO: 6655 - DNA, 15 bp, synthetic construct
  source 1..15: mol_type = other DNA
gtacttgtggtcagg

SEQ ID NO: 6656 - DNA, 15 bp, synthetic construct
  source 1..15: mol_type = other DNA
ctcccttctctctac

SEQ ID NO: 6657 - DNA, 15 bp, synthetic construct
  source 1..15: mol_type = other DNA
tcttcagggcagtac

SEQ ID NO: 6658 - DNA, 15 bp, synthetic construct
  source 1..15: mol_type = other DNA
ttgactccttcgtga

SEQ ID NO: 6659 - DNA, 15 bp, synthetic construct
  source 1..15: mol_type = other DNA
gggaggtgatgacgg

SEQ ID NO: 6660 - DNA, 15 bp, synthetic construct
  source 1..15: mol_type = other DNA
gagaacggttgagtc

SEQ ID NO: 6661 - DNA, 15 bp, synthetic construct
  source 1..15: mol_type = other DNA
tgaagtcccaataac

SEQ ID NO: 6662 - DNA, 15 bp, synthetic construct
  source 1..15: mol_type = other DNA
tttgcctacttccaa

SEQ ID NO: 6663 - DNA, 15 bp, synthetic construct
  source 1..15: mol_type = other DNA
gcacttcctcatgtg

SEQ ID NO: 6664 - DNA, 15 bp, synthetic construct
  source 1..15: mol_type = other DNA
ctcaccctgcccctt

SEQ ID NO: 6665 - DNA, 15 bp, synthetic construct
  source 1..15: mol_type = other DNA
gaggagtctgtgagc

SEQ ID NO: 6666 - DNA, 15 bp, synthetic construct
  source 1..15: mol_type = other DNA
gtgtcctacgtcagt

SEQ ID NO: 6667 - DNA, 15 bp, synthetic construct
  source 1..15: mol_type = other DNA
ccacatattctacgc

SEQ ID NO: 6668 - DNA, 15 bp, synthetic construct
  source 1..15: mol_type = other DNA
tgattgaagaaccag

SEQ ID NO: 6669 - DNA, 15 bp, synthetic construct
  source 1..15: mol_type = other DNA
tcttcaatcatcatc

SEQ ID NO: 6670 - DNA, 15 bp, synthetic construct
  source 1..15: mol_type = other DNA
atgaccagagaggac

SEQ ID NO: 6671 - DNA, 15 bp, synthetic construct
  source 1..15: mol_type = other DNA
tgacctggtactcct

SEQ ID NO: 6672 - DNA, 15 bp, synthetic construct
  source 1..15: mol_type = other DNA
caagttccacacagt

SEQ ID NO: 6673 - DNA, 15 bp, synthetic construct
  source 1..15: mol_type = other DNA
caaccaatgatcacc

SEQ ID NO: 6674 - DNA, 15 bp, synthetic construct
  source 1..15: mol_type = other DNA
taacccattctcttg

SEQ ID NO: 6675 - DNA, 15 bp, synthetic construct
  source 1..15: mol_type = other DNA
atgcaactaaatggg

SEQ ID NO: 6676 - DNA, 15 bp, synthetic construct
  source 1..15: mol_type = other DNA
ctgcaaagatgggta

SEQ ID NO: 6677 - DNA, 15 bp, synthetic construct
  source 1..15: mol_type = other DNA
accttctccgcagtc

SEQ ID NO: 6678 - DNA, 15 bp, synthetic construct
  source 1..15: mol_type = other DNA
gggcggtgtgtgcaa

SEQ ID NO: 6679 - DNA, 15 bp, synthetic construct
  source 1..15: mol_type = other DNA
ctcaccgccatagcc

SEQ ID NO: 6680 - DNA, 15 bp, synthetic construct
  source 1..15: mol_type = other DNA
gaggcagtgcccgaa

SEQ ID NO: 6681 - DNA, 15 bp, synthetic construct
  source 1..15: mol_type = other DNA
cgtcctggcacacgc

SEQ ID NO: 6682 - DNA, 15 bp, synthetic construct
  source 1..15: mol_type = other DNA
tgcaacccgggcttc

SEQ ID NO: 6683 - DNA, 15 bp, synthetic construct
  source 1..15: mol_type = other DNA
atcctcgcaaaggcc

SEQ ID NO: 6684 - DNA, 15 bp, synthetic construct
  source 1..15: mol_type = other DNA
tgcaatgcgggctac

SEQ ID NO: 6685 - DNA, 15 bp, synthetic construct
  source 1..15: mol_type = other DNA
cgcacaccgcagtcc

SEQ ID NO: 6686 - DNA, 15 bp, synthetic construct
  source 1..15: mol_type = other DNA
cgaggacggcgaatg

SEQ ID NO: 6687 - DNA, 15 bp, synthetic construct
  source 1..15: mol_type = other DNA
cggcccctttggttg

SEQ ID NO: 6688 - DNA, 15 bp, synthetic construct
  source 1..15: mol_type = other DNA
gtgaccccggctaca

SEQ ID NO: 6689 - DNA, 15 bp, synthetic construct
  source 1..15: mol_type = other DNA
cagctccgcgtacca

SEQ ID NO: 6690 - DNA, 15 bp, synthetic construct
  source 1..15: mol_type = other DNA
tgtgacccaggctac

SEQ ID NO: 6691 - DNA, 15 bp, synthetic construct
  source 1..15: mol_type = other DNA
gggcagctcctcatg

SEQ ID NO: 6692 - DNA, 15 bp, synthetic construct
  source 1..15: mol_type = other DNA
ggtcgctgtgtccgt

SEQ ID NO: 6693 - DNA, 15 bp, synthetic construct
  source 1..15: mol_type = other DNA
agccgggaaagcaca

SEQ ID NO: 6694 - DNA, 15 bp, synthetic construct
  source 1..15: mol_type = other DNA
gagactgagacttgc

SEQ ID NO: 6695 - DNA, 15 bp, synthetic construct
  source 1..15: mol_type = other DNA
cctttatggactagc

SEQ ID NO: 6696 - DNA, 15 bp, synthetic construct
  source 1..15: mol_type = other DNA
tcacccaccgcatta

SEQ ID NO: 6697 - DNA, 15 bp, synthetic construct
  source 1..15: mol_type = other DNA
aggatctctagacgg

SEQ ID NO: 6698 - DNA, 15 bp, synthetic construct
  source 1..15: mol_type = other DNA
cacggtccaatgtga

SEQ ID NO: 6699 - DNA, 15 bp, synthetic construct
  source 1..15: mol_type = other DNA
ctcgtaaagctgaga

SEQ ID NO: 6700 - DNA, 15 bp, synthetic construct
  source 1..15: mol_type = other DNA
gaagctgctctcata

SEQ ID NO: 6701 - DNA, 15 bp, synthetic construct
  source 1..15: mol_type = other DNA
ataggttaaacagaa

SEQ ID NO: 6702 - DNA, 15 bp, synthetic construct
  source 1..15: mol_type = other DNA
cagtgaattcactcg

SEQ ID NO: 6703 - DNA, 15 bp, synthetic construct
  source 1..15: mol_type = other DNA
acaaagggaaagaag

SEQ ID NO: 6704 - DNA, 15 bp, synthetic construct
  source 1..15: mol_type = other DNA
cttttaactactact

SEQ ID NO: 6705 - DNA, 15 bp, synthetic construct
  source 1..15: mol_type = other DNA
tgatttaagaagggg

SEQ ID NO: 6706 - DNA, 15 bp, synthetic construct
  source 1..15: mol_type = other DNA
atatccaaacctaca

SEQ ID NO: 6707 - DNA, 15 bp, synthetic construct
  source 1..15: mol_type = other DNA
agagattgcaccagc

SEQ ID NO: 6708 - DNA, 15 bp, synthetic construct
  source 1..15: mol_type = other DNA
gttacgtggcttttc

SEQ ID NO: 6709 - DNA, 15 bp, synthetic construct
  source 1..15: mol_type = other DNA
gcctttcagcacact

SEQ ID NO: 6710 - DNA, 15 bp, synthetic construct
  source 1..15: mol_type = other DNA
tcaaacaagtatggt

SEQ ID NO: 6711 - DNA, 15 bp, synthetic construct
  source 1..15: mol_type = other DNA
ctgaatgatttagtc

SEQ ID NO: 6712 - DNA, 15 bp, synthetic construct
  source 1..15: mol_type = other DNA
actgtgcttcttttt

SEQ ID NO: 6713 - DNA, 15 bp, synthetic construct
  source 1..15: mol_type = other DNA
caccatagagcaaga

SEQ ID NO: 6714 - DNA, 15 bp, synthetic construct
  source 1..15: mol_type = other DNA
ctttgctttgttttt

SEQ ID NO: 6715 - DNA, 15 bp, synthetic construct
  source 1..15: mol_type = other DNA
aggaacagtatttag

SEQ ID NO: 6716 - DNA, 15 bp, synthetic construct
  source 1..15: mol_type = other DNA
gtgccttggacggta

SEQ ID NO: 6717 - DNA, 15 bp, synthetic construct
  source 1..15: mol_type = other DNA
aaatcctctatagcc

SEQ ID NO: 6718 - DNA, 15 bp, synthetic construct
  source 1..15: mol_type = other DNA
aaaacgaagacccaa

SEQ ID NO: 6719 - DNA, 15 bp, synthetic construct
  source 1..15: mol_type = other DNA
aagccatgtatcacc

SEQ ID NO: 6720 - DNA, 15 bp, synthetic construct
  source 1..15: mol_type = other DNA
cctttccccaattct

SEQ ID NO: 6721 - DNA, 15 bp, synthetic construct
  source 1..15: mol_type = other DNA
ggccttaatagtact

SEQ ID NO: 6722 - DNA, 15 bp, synthetic construct
  source 1..15: mol_type = other DNA
catctggcaaatcct

SEQ ID NO: 6723 - DNA, 15 bp, synthetic construct
  source 1..15: mol_type = other DNA
gggttatgtagagac

SEQ ID NO: 6724 - DNA, 15 bp, synthetic construct
  source 1..15: mol_type = other DNA
atgaaattcatggga

SEQ ID NO: 6725 - DNA, 15 bp, synthetic construct
  source 1..15: mol_type = other DNA
cttgcctcgccttac

SEQ ID NO: 6726 - DNA, 15 bp, synthetic construct
  source 1..15: mol_type = other DNA
agactcctgacagtg

SEQ ID NO: 6727 - DNA, 15 bp, synthetic construct
  source 1..15: mol_type = other DNA
ggataagataaacct

SEQ ID NO: 6728 - DNA, 15 bp, synthetic construct
  source 1..15: mol_type = other DNA
attacaagcaaaacc

SEQ ID NO: 6729 - DNA, 15 bp, synthetic construct
  source 1..15: mol_type = other DNA
tgagagctgatgtta

SEQ ID NO: 6730 - DNA, 15 bp, synthetic construct
  source 1..15: mol_type = other DNA
ccagtggaaatccaa

SEQ ID NO: 6731 - DNA, 15 bp, synthetic construct
  source 1..15: mol_type = other DNA
aaattgtcaagaagt

SEQ ID NO: 6732 - DNA, 15 bp, synthetic construct
  source 1..15: mol_type = other DNA
ccagaaccttgaata

SEQ ID NO: 6733 - DNA, 15 bp, synthetic construct
  source 1..15: mol_type = other DNA
accctactcctaccc

SEQ ID NO: 6734 - DNA, 15 bp, synthetic construct
  source 1..15: mol_type = other DNA
tcttaagggccaaat

SEQ ID NO: 6735 - DNA, 15 bp, synthetic construct
  source 1..15: mol_type = other DNA
tgggtgcttgagtat

SEQ ID NO: 6736 - DNA, 15 bp, synthetic construct
  source 1..15: mol_type = other DNA
tagcccaattttgac

SEQ ID NO: 6737 - DNA, 15 bp, synthetic construct
  source 1..15: mol_type = other DNA
catgtcttgagaaag

SEQ ID NO: 6738 - DNA, 15 bp, synthetic construct
  source 1..15: mol_type = other DNA
ctctccttgaaaatc

SEQ ID NO: 6739 - DNA, 15 bp, synthetic construct
  source 1..15: mol_type = other DNA
ggatttacacacaaa

SEQ ID NO: 6740 - DNA, 15 bp, synthetic construct
  source 1..15: mol_type = other DNA
tcattgtgaatttgc

SEQ ID NO: 6741 - DNA, 15 bp, synthetic construct
  source 1..15: mol_type = other DNA
tatagccaccaagaa

SEQ ID NO: 6742 - DNA, 15 bp, synthetic construct
  source 1..15: mol_type = other DNA
cccttagctattttc

SEQ ID NO: 6743 - DNA, 15 bp, synthetic construct
  source 1..15: mol_type = other DNA
tttcttcaacagttt

SEQ ID NO: 6744 - DNA, 15 bp, synthetic construct
  source 1..15: mol_type = other DNA
aaattgtgactccga

SEQ ID NO: 6745 - DNA, 15 bp, synthetic construct
  source 1..15: mol_type = other DNA
gactagtaatttgag

SEQ ID NO: 6746 - DNA, 15 bp, synthetic construct
  source 1..15: mol_type = other DNA
gctattgcagatggt

SEQ ID NO: 6747 - DNA, 15 bp, synthetic construct
  source 1..15: mol_type = other DNA
gggctttatacctta

SEQ ID NO: 6748 - DNA, 15 bp, synthetic construct
  source 1..15: mol_type = other DNA
ttctaagtggaggca

SEQ ID NO: 6749 - DNA, 15 bp, synthetic construct
  source 1..15: mol_type = other DNA
gaaagagaaaagaaa

SEQ ID NO: 6750 - DNA, 15 bp, synthetic construct
  source 1..15: mol_type = other DNA
gataattgtgtgtgt

SEQ ID NO: 6751 - DNA, 15 bp, synthetic construct
  source 1..15: mol_type = other DNA
cactaacattcagta

SEQ ID NO: 6752 - DNA, 15 bp, synthetic construct
  source 1..15: mol_type = other DNA
tcccctagggtggta

SEQ ID NO: 6753 - DNA, 15 bp, synthetic construct
  source 1..15: mol_type = other DNA
gtaggctgctatcca

SEQ ID NO: 6754 - DNA, 15 bp, synthetic construct
  source 1..15: mol_type = other DNA
tgggtccactttcat

SEQ ID NO: 6755 - DNA, 15 bp, synthetic construct
  source 1..15: mol_type = other DNA
aagtcttattatgtg

SEQ ID NO: 6756 - DNA, 15 bp, synthetic construct
  source 1..15: mol_type = other DNA
ctttgacgttttctt

SEQ ID NO: 6757 - DNA, 15 bp, synthetic construct
  source 1..15: mol_type = other DNA
agtcacattttatac

SEQ ID NO: 6758 - DNA, 15 bp, synthetic construct
  source 1..15: mol_type = other DNA
gctttttcctctcct

SEQ ID NO: 6759 - DNA, 15 bp, synthetic construct
  source 1..15: mol_type = other DNA
tcattgaaacataag

SEQ ID NO: 6760 - DNA, 15 bp, synthetic construct
  source 1..15: mol_type = other DNA
aaatgagacacaaag

SEQ ID NO: 6761 - DNA, 15 bp, synthetic construct
  source 1..15: mol_type = other DNA
ttagaaaacacactg

SEQ ID NO: 6762 - DNA, 15 bp, synthetic construct
  source 1..15: mol_type = other DNA
ttctttctagtgttt

SEQ ID NO: 6763 - DNA, 15 bp, synthetic construct
  source 1..15: mol_type = other DNA
cagtttgaagtggta

SEQ ID NO: 6764 - DNA, 15 bp, synthetic construct
  source 1..15: mol_type = other DNA
cctgttaccgaggac

SEQ ID NO: 6765 - DNA, 15 bp, synthetic construct
  source 1..15: mol_type = other DNA
ctccaaaacaataca

SEQ ID NO: 6766 - DNA, 15 bp, synthetic construct
  source 1..15: mol_type = other DNA
ttatgtggccttttg

SEQ ID NO: 6767 - DNA, 15 bp, synthetic construct
  source 1..15: mol_type = other DNA
ctgacctagacaccc

SEQ ID NO: 6768 - DNA, 15 bp, synthetic construct
  source 1..15: mol_type = other DNA
gtttatccttttgcg

SEQ ID NO: 6769 - DNA, 15 bp, synthetic construct
  source 1..15: mol_type = other DNA
accacttgctgatac

SEQ ID NO: 6770 - DNA, 15 bp, synthetic construct
  source 1..15: mol_type = other DNA
gcctttggatataca

SEQ ID NO: 6771 - DNA, 15 bp, synthetic construct
  source 1..15: mol_type = other DNA
acaaaccctgaagtt

SEQ ID NO: 6772 - DNA, 15 bp, synthetic construct
  source 1..15: mol_type = other DNA
ccagtcttgcatatc

SEQ ID NO: 6773 - DNA, 15 bp, synthetic construct
  source 1..15: mol_type = other DNA
ttgcctaaactacct

SEQ ID NO: 6774 - DNA, 15 bp, synthetic construct
  source 1..15: mol_type = other DNA
aggtacaaaatcaaa

SEQ ID NO: 6775 - DNA, 15 bp, synthetic construct
  source 1..15: mol_type = other DNA
tctctactcacctaa

SEQ ID NO: 6776 - DNA, 15 bp, synthetic construct
  source 1..15: mol_type = other DNA
tcagccctcgaaagg

SEQ ID NO: 6777 - DNA, 15 bp, synthetic construct
  source 1..15: mol_type = other DNA
actaccccagttaca

SEQ ID NO: 6778 - DNA, 15 bp, synthetic construct
  source 1..15: mol_type = other DNA
atggatcaagtaaac

SEQ ID NO: 6779 - DNA, 15 bp, synthetic construct
  source 1..15: mol_type = other DNA
atcatgaccgtcacc

SEQ ID NO: 6780 - DNA, 15 bp, synthetic construct
  source 1..15: mol_type = other DNA
ttcccagcgcgagtt

SEQ ID NO: 6781 - DNA, 15 bp, synthetic construct
  source 1..15: mol_type = other DNA
tgaagctcctctcgg

SEQ ID NO: 6782 - DNA, 15 bp, synthetic construct
  source 1..15: mol_type = other DNA
tggcgctcgcacaac

SEQ ID NO: 6783 - DNA, 15 bp, synthetic construct
  source 1..15: mol_type = other DNA
agccctatcagagtt

SEQ ID NO: 6784 - DNA, 15 bp, synthetic construct
  source 1..15: mol_type = other DNA
gacattttccatcat

SEQ ID NO: 6785 - DNA, 15 bp, synthetic construct
  source 1..15: mol_type = other DNA
agtgtatccattgtg

SEQ ID NO: 6786 - DNA, 15 bp, synthetic construct
  source 1..15: mol_type = other DNA
tgaagactcacttac

SEQ ID NO: 6787 - DNA, 15 bp, synthetic construct
  source 1..15: mol_type = other DNA
atggctggatccaag

SEQ ID NO: 6788 - DNA, 15 bp, synthetic construct
  source 1..15: mol_type = other DNA
gcctctttcagaaca

SEQ ID NO: 6789 - DNA, 15 bp, synthetic construct
  source 1..15: mol_type = other DNA
tcagaacttggaaat

SEQ ID NO: 6790 - DNA, 15 bp, synthetic construct
  source 1..15: mol_type = other DNA
ggagtttacagttac

SEQ ID NO: 6791 - DNA, 15 bp, synthetic construct
  source 1..15: mol_type = other DNA
atagagtgtctctta

SEQ ID NO: 6792 - DNA, 15 bp, synthetic construct
  source 1..15: mol_type = other DNA
agaaaaacactttgc

SEQ ID NO: 6793 - DNA, 15 bp, synthetic construct
  source 1..15: mol_type = other DNA
atggcatatgatttt

SEQ ID NO: 6794 - DNA, 15 bp, synthetic construct
  source 1..15: mol_type = other DNA
agctccccatcaaga

SEQ ID NO: 6795 - DNA, 15 bp, synthetic construct
  source 1..15: mol_type = other DNA
attcagaagaaaaga

SEQ ID NO: 6796 - DNA, 15 bp, synthetic construct
  source 1..15: mol_type = other DNA
aaggataatacttgg

SEQ ID NO: 6797 - DNA, 15 bp, synthetic construct
  source 1..15: mol_type = other DNA
agttattttcttaga

SEQ ID NO: 6798 - DNA, 15 bp, synthetic construct
  source 1..15: mol_type = other DNA
gtttgcttctctttt

SEQ ID NO: 6799 - DNA, 15 bp, synthetic construct
  source 1..15: mol_type = other DNA
cagtgaaaaagaagg

SEQ ID NO: 6800 - DNA, 15 bp, synthetic construct
  source 1..15: mol_type = other DNA
gcatccagcacaaac

SEQ ID NO: 6801 - DNA, 15 bp, synthetic construct
  source 1..15: mol_type = other DNA
aatgttgcttactat

SEQ ID NO: 6802 - DNA, 15 bp, synthetic construct
  source 1..15: mol_type = other DNA
ttctactacgtgaca

SEQ ID NO: 6803 - DNA, 15 bp, synthetic construct
  source 1..15: mol_type = other DNA
caagtctgtctaaac

SEQ ID NO: 6804 - DNA, 15 bp, synthetic construct
  source 1..15: mol_type = other DNA
tccttgaattcaagt

SEQ ID NO: 6805 - DNA, 15 bp, synthetic construct
  source 1..15: mol_type = other DNA
taattgggattcctg

SEQ ID NO: 6806 - DNA, 15 bp, synthetic construct
  source 1..15: mol_type = other DNA
taatttggcatccat

SEQ ID NO: 6807 - DNA, 15 bp, synthetic construct
  source 1..15: mol_type = other DNA
gagaaggaccacttc

SEQ ID NO: 6808 - DNA, 15 bp, synthetic construct
  source 1..15: mol_type = other DNA
tcttccagcctactg

SEQ ID NO: 6809 - DNA, 15 bp, synthetic construct
  source 1..15: mol_type = other DNA
acataccaaagtgtt

SEQ ID NO: 6810 - DNA, 15 bp, synthetic construct
  source 1..15: mol_type = other DNA
atgtaaaacgcagca

SEQ ID NO: 6811 - DNA, 15 bp, synthetic construct
  source 1..15: mol_type = other DNA
attcatgctgtaaca

SEQ ID NO: 6812 - DNA, 15 bp, synthetic construct
  source 1..15: mol_type = other DNA
tattggtaccaaacc

SEQ ID NO: 6813 - DNA, 15 bp, synthetic construct
  source 1..15: mol_type = other DNA
ttaacagatttacag

SEQ ID NO: 6814 - DNA, 15 bp, synthetic construct
  source 1..15: mol_type = other DNA
acctaacaactacct

SEQ ID NO: 6815 - DNA, 15 bp, synthetic construct
  source 1..15: mol_type = other DNA
ggcaagtgtttgtag

SEQ ID NO: 6816 - DNA, 15 bp, synthetic construct
  source 1..15: mol_type = other DNA
accaacctcgagcct

SEQ ID NO: 6817 - DNA, 15 bp, synthetic construct
  source 1..15: mol_type = other DNA
tggttaaacaaggaa

SEQ ID NO: 6818 - DNA, 15 bp, synthetic construct
  source 1..15: mol_type = other DNA
ttctgacattgtctc

SEQ ID NO: 6819 - DNA, 15 bp, synthetic construct
  source 1..15: mol_type = other DNA
ttaatagcctgcttt

SEQ ID NO: 6820 - DNA, 15 bp, synthetic construct
  source 1..15: mol_type = other DNA
tcttcatgtttcttg

SEQ ID NO: 6821 - DNA, 15 bp, synthetic construct
  source 1..15: mol_type = other DNA
aaagaagatgaaaat

SEQ ID NO: 6822 - DNA, 15 bp, synthetic construct
  source 1..15: mol_type = other DNA
agtctacataggaga

SEQ ID NO: 6823 - DNA, 15 bp, synthetic construct
  source 1..15: mol_type = other DNA
ctcagctggttttta

SEQ ID NO: 6824 - DNA, 15 bp, synthetic construct
  source 1..15: mol_type = other DNA
agagtatgaaaaccg

SEQ ID NO: 6825 - DNA, 15 bp, synthetic construct
  source 1..15: mol_type = other DNA
gcggacgtcggcttc

SEQ ID NO: 6826 - DNA, 15 bp, synthetic construct
  source 1..15: mol_type = other DNA
acccgcgagctctcc

SEQ ID NO: 6827 - DNA, 15 bp, synthetic construct
  source 1..15: mol_type = other DNA
tctttgtggtattaa

SEQ ID NO: 6828 - DNA, 15 bp, synthetic construct
  source 1..15: mol_type = other DNA
ctcttctcccattta

SEQ ID NO: 6829 - DNA, 15 bp, synthetic construct
  source 1..15: mol_type = other DNA
ggaatgtgaaaaagc

SEQ ID NO: 6830 - DNA, 15 bp, synthetic construct
  source 1..15: mol_type = other DNA
caacaatgatatcca

SEQ ID NO: 6831 - DNA, 15 bp, synthetic construct
  source 1..15: mol_type = other DNA
ttaccaaaatgtgtt

SEQ ID NO: 6832 - DNA, 15 bp, synthetic construct
  source 1..15: mol_type = other DNA
agacttgctacattc

SEQ ID NO: 6833 - DNA, 15 bp, synthetic construct
  source 1..15: mol_type = other DNA
gaattcaaggatgac

SEQ ID NO: 6834 - DNA, 15 bp, synthetic construct
  source 1..15: mol_type = other DNA
aggaagttactgtag

SEQ ID NO: 6835 - DNA, 15 bp, synthetic construct
  source 1..15: mol_type = other DNA
aaacatggcatgtaa

SEQ ID NO: 6836 - DNA, 15 bp, synthetic construct
  source 1..15: mol_type = other DNA
ttactgttttacctg

SEQ ID NO: 6837 - DNA, 15 bp, synthetic construct
  source 1..15: mol_type = other DNA
ttgtgcctgtttgct

SEQ ID NO: 6838 - DNA, 15 bp, synthetic construct
  source 1..15: mol_type = other DNA
ttcaccatcatctgt

SEQ ID NO: 6839 - DNA, 15 bp, synthetic construct
  source 1..15: mol_type = other DNA
gaaccctgaataaca

SEQ ID NO: 6840 - DNA, 15 bp, synthetic construct
  source 1..15: mol_type = other DNA
cccatcataatttgc

SEQ ID NO: 6841 - DNA, 15 bp, synthetic construct
  source 1..15: mol_type = other DNA
attctaggtgtcatt

SEQ ID NO: 6842 - DNA, 15 bp, synthetic construct
  source 1..15: mol_type = other DNA
ctaacaagtccatca

SEQ ID NO: 6843 - DNA, 15 bp, synthetic construct
  source 1..15: mol_type = other DNA
gctgggtaactgtaa

SEQ ID NO: 6844 - DNA, 15 bp, synthetic construct
  source 1..15: mol_type = other DNA
aatgcttccaacaag

SEQ ID NO: 6845 - DNA, 15 bp, synthetic construct
  source 1..15: mol_type = other DNA
atttgtgtgagccac

SEQ ID NO: 6846 - DNA, 15 bp, synthetic construct
  source 1..15: mol_type = other DNA
cagctcttctagatt

SEQ ID NO: 6847 - DNA, 15 bp, synthetic construct
  source 1..15: mol_type = other DNA
gcattcctgtggtcc

SEQ ID NO: 6848 - DNA, 15 bp, synthetic construct
  source 1..15: mol_type = other DNA
gcaaaattgtctgga

SEQ ID NO: 6849 - DNA, 15 bp, synthetic construct
  source 1..15: mol_type = other DNA
taggagactggagaa

SEQ ID NO: 6850 - DNA, 15 bp, synthetic construct
  source 1..15: mol_type = other DNA
atagctacatctgaa

SEQ ID NO: 6851 - DNA, 15 bp, synthetic construct
  source 1..15: mol_type = other DNA
ccaccattattattt

SEQ ID NO: 6852 - DNA, 15 bp, synthetic construct
  source 1..15: mol_type = other DNA
atgcatgtgaacact

SEQ ID NO: 6853 - DNA, 15 bp, synthetic construct
  source 1..15: mol_type = other DNA
taaaactgtcttctt

SEQ ID NO: 6854 - DNA, 15 bp, synthetic construct
  source 1..15: mol_type = other DNA
aactccaagcattgt

SEQ ID NO: 6855 - DNA, 15 bp, synthetic construct
  source 1..15: mol_type = other DNA
ttccagcctgataca

SEQ ID NO: 6856 - DNA, 15 bp, synthetic construct
  source 1..15: mol_type = other DNA
ttggctataggaggt

SEQ ID NO: 6857 - DNA, 15 bp, synthetic construct
  source 1..15: mol_type = other DNA
cactggaacagaaac

SEQ ID NO: 6858 - DNA, 15 bp, synthetic construct
  source 1..15: mol_type = other DNA
gatttagaaaggcaa

SEQ ID NO: 6859 - DNA, 15 bp, synthetic construct
  source 1..15: mol_type = other DNA
aatcggtattaggcc

SEQ ID NO: 6860 - DNA, 15 bp, synthetic construct
  source 1..15: mol_type = other DNA
ttacctgtttctttg

SEQ ID NO: 6861 - DNA, 15 bp, synthetic construct
  source 1..15: mol_type = other DNA
accaaaatcagtaga

SEQ ID NO: 6862 - DNA, 15 bp, synthetic construct
  source 1..15: mol_type = other DNA
atcagtaaggaccat

SEQ ID NO: 6863 - DNA, 15 bp, synthetic construct
  source 1..15: mol_type = other DNA
tgaaaagcacaggtc

SEQ ID NO: 6864 - DNA, 15 bp, synthetic construct
  source 1..15: mol_type = other DNA
aatgtccaccattga

SEQ ID NO: 6865 - DNA, 15 bp, synthetic construct
  source 1..15: mol_type = other DNA
cctcagaaaacttgc

SEQ ID NO: 6866 - DNA, 15 bp, synthetic construct
  source 1..15: mol_type = other DNA
gaacacacctctctc

SEQ ID NO: 6867 - DNA, 15 bp, synthetic construct
  source 1..15: mol_type = other DNA
aaatccataaaagtt

SEQ ID NO: 6868 - DNA, 15 bp, synthetic construct
  source 1..15: mol_type = other DNA
ccacaaagaatccca

SEQ ID NO: 6869 - DNA, 15 bp, synthetic construct
  source 1..15: mol_type = other DNA
gtgatttttccagtt

SEQ ID NO: 6870 - DNA, 15 bp, synthetic construct
  source 1..15: mol_type = other DNA
tgtttccactttagc

SEQ ID NO: 6871 - DNA, 15 bp, synthetic construct
  source 1..15: mol_type = other DNA
gccatctgtgtacct

SEQ ID NO: 6872 - DNA, 15 bp, synthetic construct
  source 1..15: mol_type = other DNA
gttaagtagtactca

SEQ ID NO: 6873 - DNA, 15 bp, synthetic construct
  source 1..15: mol_type = other DNA
ttcccatgaactggt

SEQ ID NO: 6874 - DNA, 15 bp, synthetic construct
  source 1..15: mol_type = other DNA
caggaaccgattacc

SEQ ID NO: 6875 - DNA, 15 bp, synthetic construct
  source 1..15: mol_type = other DNA
cattgtactgttgaa

SEQ ID NO: 6876 - DNA, 15 bp, synthetic construct
  source 1..15: mol_type = other DNA
tccctggaacattat

SEQ ID NO: 6877 - DNA, 15 bp, synthetic construct
  source 1..15: mol_type = other DNA
tcttctttgatcata

SEQ ID NO: 6878 - DNA, 15 bp, synthetic construct
  source 1..15: mol_type = other DNA
atttccgtgaaaatg

SEQ ID NO: 6879 - DNA, 15 bp, synthetic construct
  source 1..15: mol_type = other DNA
aaacaacactgtcca

SEQ ID NO: 6880 - DNA, 15 bp, synthetic construct
  source 1..15: mol_type = other DNA
cataaaaccctagtt

SEQ ID NO: 6881 - DNA, 15 bp, synthetic construct
  source 1..15: mol_type = other DNA
atctggccgtccaag

SEQ ID NO: 6882 - DNA, 15 bp, synthetic construct
  source 1..15: mol_type = other DNA
gtctttgcccattag

SEQ ID NO: 6883 - DNA, 15 bp, synthetic construct
  source 1..15: mol_type = other DNA
atttgctcaatgtct

SEQ ID NO: 6884 - DNA, 15 bp, synthetic construct
  source 1..15: mol_type = other DNA
taaattcatggaacg

SEQ ID NO: 6885 - DNA, 15 bp, synthetic construct
  source 1..15: mol_type = other DNA
acatcaaaaccaaga

SEQ ID NO: 6886 - DNA, 15 bp, synthetic construct
  source 1..15: mol_type = other DNA
aacaaattaggtgct

SEQ ID NO: 6887 - DNA, 15 bp, synthetic construct
  source 1..15: mol_type = other DNA
aaattaagctcccag

SEQ ID NO: 6888 - DNA, 15 bp, synthetic construct
  source 1..15: mol_type = other DNA
ttaatggaaccacca

SEQ ID NO: 6889 - DNA, 15 bp, synthetic construct
  source 1..15: mol_type = other DNA
taaactggtcaactt

SEQ ID NO: 6890 - DNA, 15 bp, synthetic construct
  source 1..15: mol_type = other DNA
gcatcagggtctaat

SEQ ID NO: 6891 - DNA, 15 bp, synthetic construct
  source 1..15: mol_type = other DNA
aaagcttagccagag

SEQ ID NO: 6892 - DNA, 15 bp, synthetic construct
  source 1..15: mol_type = other DNA
cataaccagagcatt

SEQ ID NO: 6893 - DNA, 15 bp, synthetic construct
  source 1..15: mol_type = other DNA
tgaactttctcacta

SEQ ID NO: 6894 - DNA, 15 bp, synthetic construct
  source 1..15: mol_type = other DNA
gaaatgggtggaatg

SEQ ID NO: 6895 - DNA, 15 bp, synthetic construct
  source 1..15: mol_type = other DNA
cttcaattcgaagtt

SEQ ID NO: 6896 - DNA, 15 bp, synthetic construct
  source 1..15: mol_type = other DNA
aatgactttgatgtt

SEQ ID NO: 6897 - DNA, 15 bp, synthetic construct
  source 1..15: mol_type = other DNA
agttgcaaagtggaa

SEQ ID NO: 6898 - DNA, 15 bp, synthetic construct
  source 1..15: mol_type = other DNA
aatagaagcaatggc

SEQ ID NO: 6899 - DNA, 15 bp, synthetic construct
  source 1..15: mol_type = other DNA
tgtgcaaagactgag

SEQ ID NO: 6900 - DNA, 15 bp, synthetic construct
  source 1..15: mol_type = other DNA
ttctaattttggctt

SEQ ID NO: 6901 - DNA, 15 bp, synthetic construct
  source 1..15: mol_type = other DNA
tcctgcttgtgccac

SEQ ID NO: 6902 - DNA, 15 bp, synthetic construct
  source 1..15: mol_type = other DNA
agatgagagctggta

SEQ ID NO: 6903 - DNA, 15 bp, synthetic construct
  source 1..15: mol_type = other DNA
agtaagtgaccatcc

SEQ ID NO: 6904 - DNA, 15 bp, synthetic construct
  source 1..15: mol_type = other DNA
tagtgtgtgatacaa

SEQ ID NO: 6905 - DNA, 15 bp, synthetic construct
  source 1..15: mol_type = other DNA
attatcactcagata

SEQ ID NO: 6906 - DNA, 15 bp, synthetic construct
  source 1..15: mol_type = other DNA
tatactttagcagat

SEQ ID NO: 6907 - DNA, 15 bp, synthetic construct
  source 1..15: mol_type = other DNA
tcaccttggtgcaaa

SEQ ID NO: 6908 - DNA, 15 bp, synthetic construct
  source 1..15: mol_type = other DNA
atttaataggacctt

SEQ ID NO: 6909 - DNA, 15 bp, synthetic construct
  source 1..15: mol_type = other DNA
ctatagaaaaaccta

SEQ ID NO: 6910 - DNA, 15 bp, synthetic construct
  source 1..15: mol_type = other DNA
tgaatggagcagtta

SEQ ID NO: 6911 - DNA, 15 bp, synthetic construct
  source 1..15: mol_type = other DNA
cttgttcttctccag

SEQ ID NO: 6912 - DNA, 15 bp, synthetic construct
  source 1..15: mol_type = other DNA
gctggtcagcaggga

SEQ ID NO: 6913 - DNA, 15 bp, synthetic construct
  source 1..15: mol_type = other DNA
gttgtctgaatcata

SEQ ID NO: 6914 - DNA, 15 bp, synthetic construct
  source 1..15: mol_type = other DNA
caactgactctctta

SEQ ID NO: 6915 - DNA, 15 bp, synthetic construct
  source 1..15: mol_type = other DNA
tgaccacagaagtta

SEQ ID NO: 6916 - DNA, 15 bp, synthetic construct
  source 1..15: mol_type = other DNA
ctttaggccctggac

SEQ ID NO: 6917 - DNA, 15 bp, synthetic construct
  source 1..15: mol_type = other DNA
cagtactaaaaccag

SEQ ID NO: 6918 - DNA, 15 bp, synthetic construct
  source 1..15: mol_type = other DNA
agacctaatatggca

SEQ ID NO: 6919 - DNA, 15 bp, synthetic construct
  source 1..15: mol_type = other DNA
aatacaagggtttta

SEQ ID NO: 6920 - DNA, 15 bp, synthetic construct
  source 1..15: mol_type = other DNA
tgggtgtttccatgc

SEQ ID NO: 6921 - DNA, 15 bp, synthetic construct
  source 1..15: mol_type = other DNA
tccccagcttattat

SEQ ID NO: 6922 - DNA, 15 bp, synthetic construct
  source 1..15: mol_type = other DNA
acttcagacaagaga

SEQ ID NO: 6923 - DNA, 15 bp, synthetic construct
  source 1..15: mol_type = other DNA
actcagccgactttg

SEQ ID NO: 6924 - DNA, 15 bp, synthetic construct
  source 1..15: mol_type = other DNA
agccgccacattgtc

SEQ ID NO: 6925 - DNA, 15 bp, synthetic construct
  source 1..15: mol_type = other DNA
agcaactgctcttgg

SEQ ID NO: 6926 - DNA, 15 bp, synthetic construct
  source 1..15: mol_type = other DNA
agaatgaaggtcatg

SEQ ID NO: 6927 - DNA, 15 bp, synthetic construct
  source 1..15: mol_type = other DNA
ggacactccattcat

SEQ ID NO: 6928 - DNA, 15 bp, synthetic construct
  source 1..15: mol_type = other DNA
gtatgcaaaatgtgt

SEQ ID NO: 6929 - DNA, 15 bp, synthetic construct
  source 1..15: mol_type = other DNA
aattgcttcagagac

SEQ ID NO: 6930 - DNA, 15 bp, synthetic construct
  source 1..15: mol_type = other DNA
cctgaagagattcct

SEQ ID NO: 6931 - DNA, 15 bp, synthetic construct
  source 1..15: mol_type = other DNA
cggcgtttggatgag

SEQ ID NO: 6932 - DNA, 15 bp, synthetic construct
  source 1..15: mol_type = other DNA
tggtcagtatatagg

SEQ ID NO: 6933 - DNA, 15 bp, synthetic construct
  source 1..15: mol_type = other DNA
aaatttgtctttggg

SEQ ID NO: 6934 - DNA, 15 bp, synthetic construct
  source 1..15: mol_type = other DNA
agctcgatccaagcc

SEQ ID NO: 6935 - DNA, 15 bp, synthetic construct
  source 1..15: mol_type = other DNA
cttctccttcctagt

SEQ ID NO: 6936 - DNA, 15 bp, synthetic construct
  source 1..15: mol_type = other DNA
atcttgtgattctct

SEQ ID NO: 6937 - DNA, 15 bp, synthetic construct
  source 1..15: mol_type = other DNA
tctttcttctcaagc

SEQ ID NO: 6938 - DNA, 15 bp, synthetic construct
  source 1..15: mol_type = other DNA
agatggttatgttag

SEQ ID NO: 6939 - DNA, 15 bp, synthetic construct
  source 1..15: mol_type = other DNA
aagtgccagtttgac

SEQ ID NO: 6940 - DNA, 15 bp, synthetic construct
  source 1..15: mol_type = other DNA
tcatttggttctaag

SEQ ID NO: 6941 - DNA, 15 bp, synthetic construct
  source 1..15: mol_type = other DNA
gataaagtggtaaca

SEQ ID NO: 6942 - DNA, 15 bp, synthetic construct
  source 1..15: mol_type = other DNA
caactttttcttcct

SEQ ID NO: 6943 - DNA, 15 bp, synthetic construct
  source 1..15: mol_type = other DNA
tgaatgctacatgct

SEQ ID NO: 6944 - DNA, 15 bp, synthetic construct
  source 1..15: mol_type = other DNA
accatagggatatgt

SEQ ID NO: 6945 - DNA, 15 bp, synthetic construct
  source 1..15: mol_type = other DNA
tttggatgtgaatat

SEQ ID NO: 6946 - DNA, 15 bp, synthetic construct
  source 1..15: mol_type = other DNA
actgtggaaactatc

SEQ ID NO: 6947 - DNA, 15 bp, synthetic construct
  source 1..15: mol_type = other DNA
gatagtcatattcag

SEQ ID NO: 6948 - DNA, 15 bp, synthetic construct
  source 1..15: mol_type = other DNA
acttgcactagtcat

SEQ ID NO: 6949 - DNA, 15 bp, synthetic construct
  source 1..15: mol_type = other DNA
gagaggcctacgttg

SEQ ID NO: 6950 - DNA, 15 bp, synthetic construct
  source 1..15: mol_type = other DNA
aatacgctcaggtgt

SEQ ID NO: 6951 - DNA, 15 bp, synthetic construct
  source 1..15: mol_type = other DNA
ctatttcccagcctt

SEQ ID NO: 6952 - DNA, 15 bp, synthetic construct
  source 1..15: mol_type = other DNA
cttggctgtattcta

SEQ ID NO: 6953 - DNA, 15 bp, synthetic construct
  source 1..15: mol_type = other DNA
ggaataaaactttcc

SEQ ID NO: 6954 - DNA, 15 bp, synthetic construct
  source 1..15: mol_type = other DNA
tctgtgactagtggt

SEQ ID NO: 6955 - DNA, 15 bp, synthetic construct
  source 1..15: mol_type = other DNA
catttacactgctaa

SEQ ID NO: 6956 - DNA, 15 bp, synthetic construct
  source 1..15: mol_type = other DNA
tgatggattacaaat

SEQ ID NO: 6957 - DNA, 15 bp, synthetic construct
  source 1..15: mol_type = other DNA
ccatttggtccatgc

SEQ ID NO: 6958 - DNA, 15 bp, synthetic construct
  source 1..15: mol_type = other DNA
gatattacaaggtgt

SEQ ID NO: 6959 - DNA, 15 bp, synthetic construct
  source 1..15: mol_type = other DNA
tgcattcagatatag

SEQ ID NO: 6960 - DNA, 15 bp, synthetic construct
  source 1..15: mol_type = other DNA
catgaaatgaaagag

SEQ ID NO: 6961 - DNA, 15 bp, synthetic construct
  source 1..15: mol_type = other DNA
attcatttctatttc

SEQ ID NO: 6962 - DNA, 15 bp, synthetic construct
  source 1..15: mol_type = other DNA
tagcgatgacctgga

SEQ ID NO: 6963 - DNA, 15 bp, synthetic construct
  source 1..15: mol_type = other DNA
gcatcctggtcctct

SEQ ID NO: 6964 - DNA, 15 bp, synthetic construct
  source 1..15: mol_type = other DNA
taactaacttagggt

SEQ ID NO: 6965 - DNA, 15 bp, synthetic construct
  source 1..15: mol_type = other DNA
ccacaatgtaccttt

SEQ ID NO: 6966 - DNA, 15 bp, synthetic construct
  source 1..15: mol_type = other DNA
tgacatcaacagata

SEQ ID NO: 6967 - DNA, 15 bp, synthetic construct
  source 1..15: mol_type = other DNA
agaataccaattcga

SEQ ID NO: 6968 - DNA, 15 bp, synthetic construct
  source 1..15: mol_type = other DNA
tacatgtagagaaca

SEQ ID NO: 6969 - DNA, 15 bp, synthetic construct
  source 1..15: mol_type = other DNA
atacactactgccaa

SEQ ID NO: 6970 - DNA, 15 bp, synthetic construct
  source 1..15: mol_type = other DNA
acttggctttcacat

SEQ ID NO: 6971 - DNA, 15 bp, synthetic construct
  source 1..15: mol_type = other DNA
aatgcgccacattgt

SEQ ID NO: 6972 - DNA, 15 bp, synthetic construct
  source 1..15: mol_type = other DNA
tgtgtttggcacagc

SEQ ID NO: 6973 - DNA, 15 bp, synthetic construct
  source 1..15: mol_type = other DNA
cagtataggcctgac

SEQ ID NO: 6974 - DNA, 15 bp, synthetic construct
  source 1..15: mol_type = other DNA
gatgacatgcatttg

SEQ ID NO: 6975 - DNA, 15 bp, synthetic construct
  source 1..15: mol_type = other DNA
aatggccaattactt

SEQ ID NO: 6976 - DNA, 15 bp, synthetic construct
  source 1..15: mol_type = other DNA
ctagtgatttttgaa

SEQ ID NO: 6977 - DNA, 15 bp, synthetic construct
  source 1..15: mol_type = other DNA
tggacctctttcatg

SEQ ID NO: 6978 - DNA, 15 bp, synthetic construct
  source 1..15: mol_type = other DNA
tgaaacaaactagca

SEQ ID NO: 6979 - DNA, 15 bp, synthetic construct
  source 1..15: mol_type = other DNA
ttcctagctcattca

SEQ ID NO: 6980 - DNA, 15 bp, synthetic construct
  source 1..15: mol_type = other DNA
gatttgtgctgcact

SEQ ID NO: 6981 - DNA, 15 bp, synthetic construct
  source 1..15: mol_type = other DNA
tacttgctcatcctt

SEQ ID NO: 6982 - DNA, 15 bp, synthetic construct
  source 1..15: mol_type = other DNA
tttttctatccaact

SEQ ID NO: 6983 - DNA, 15 bp, synthetic construct
  source 1..15: mol_type = other DNA
actcacaagagagct

SEQ ID NO: 6984 - DNA, 15 bp, synthetic construct
  source 1..15: mol_type = other DNA
aggaacaaaagcttc

SEQ ID NO: 6985 - DNA, 15 bp, synthetic construct
  source 1..15: mol_type = other DNA
ttgttcctgggtcaa

SEQ ID NO: 6986 - DNA, 15 bp, synthetic construct
  source 1..15: mol_type = other DNA
ctgcatgaccattga

SEQ ID NO: 6987 - DNA, 15 bp, synthetic construct
  source 1..15: mol_type = other DNA
ctcgcaatccttgtg

SEQ ID NO: 6988 - DNA, 15 bp, synthetic construct
  source 1..15: mol_type = other DNA
gtacacagctcccaa

SEQ ID NO: 6989 - DNA, 15 bp, synthetic construct
  source 1..15: mol_type = other DNA
aacaacataagtgcc

SEQ ID NO: 6990 - DNA, 15 bp, synthetic construct
  source 1..15: mol_type = other DNA
agctttaaaatggtc

SEQ ID NO: 6991 - DNA, 15 bp, synthetic construct
  source 1..15: mol_type = other DNA
aaaatgagaacgtca

SEQ ID NO: 6992 - DNA, 15 bp, synthetic construct
  source 1..15: mol_type = other DNA
ggcagcttctttggg

SEQ ID NO: 6993 - DNA, 15 bp, synthetic construct
  source 1..15: mol_type = other DNA
gtggaatttgtagaa

SEQ ID NO: 6994 - DNA, 15 bp, synthetic construct
  source 1..15: mol_type = other DNA
tcacatgcaagttgt

SEQ ID NO: 6995 - DNA, 15 bp, synthetic construct
  source 1..15: mol_type = other DNA
catccaattggatac

SEQ ID NO: 6996 - DNA, 15 bp, synthetic construct
  source 1..15: mol_type = other DNA
tgagcactattgtgt

SEQ ID NO: 6997 - DNA, 15 bp, synthetic construct
  source 1..15: mol_type = other DNA
gcagcataccaacta

SEQ ID NO: 6998 - DNA, 15 bp, synthetic construct
  source 1..15: mol_type = other DNA
tctcaacccattttt

SEQ ID NO: 6999 - DNA, 15 bp, synthetic construct
  source 1..15: mol_type = other DNA
attcccatttcactt

SEQ ID NO: 7000 - DNA, 15 bp, synthetic construct
  source 1..15: mol_type = other DNA
tgcttctatggaaac

SEQ ID NO: 7001 - DNA, 15 bp, synthetic construct
  source 1..15: mol_type = other DNA
aattgaccaaacaag

SEQ ID NO: 7002 - DNA, 15 bp, synthetic construct
  source 1..15: mol_type = other DNA
taagaccatcactcc

SEQ ID NO: 7003 - DNA, 15 bp, synthetic construct
  source 1..15: mol_type = other DNA
tactgatgcaatctt

SEQ ID NO: 7004 - DNA, 15 bp, synthetic construct
  source 1..15: mol_type = other DNA
tctgtgtatgtcatc

SEQ ID NO: 7005 - DNA, 15 bp, synthetic construct
  source 1..15: mol_type = other DNA
gacaccatcagttcc

SEQ ID NO: 7006 - DNA, 15 bp, synthetic construct
  source 1..15: mol_type = other DNA
tcttgctgttgaaac

SEQ ID NO: 7007 - DNA, 15 bp, synthetic construct
  source 1..15: mol_type = other DNA
tcaataagaaaatga

SEQ ID NO: 7008 - DNA, 15 bp, synthetic construct
  source 1..15: mol_type = other DNA
atcattatggaaatc

SEQ ID NO: 7009 - DNA, 15 bp, synthetic construct
  source 1..15: mol_type = other DNA
atgtaattttgttgt

SEQ ID NO: 7010 - DNA, 15 bp, synthetic construct
  source 1..15: mol_type = other DNA
acaggaagtccgcaa

SEQ ID NO: 7011 - DNA, 15 bp, synthetic construct
  source 1..15: mol_type = other DNA
tgacagcacagcaat

SEQ ID NO: 7012 - DNA, 15 bp, synthetic construct
  source 1..15: mol_type = other DNA
ttaggtatggtctct

SEQ ID NO: 7013 - DNA, 15 bp, synthetic construct
  source 1..15: mol_type = other DNA
aggtggctgaaattt

SEQ ID NO: 7014 - DNA, 15 bp, synthetic construct
  source 1..15: mol_type = other DNA
agtaatctgcatttt

SEQ ID NO: 7015 - DNA, 15 bp, synthetic construct
  source 1..15: mol_type = other DNA
gagcattctacagta

SEQ ID NO: 7016 - DNA, 15 bp, synthetic construct
  source 1..15: mol_type = other DNA
gagtctttctttcca

SEQ ID NO: 7017 - DNA, 15 bp, synthetic construct
  source 1..15: mol_type = other DNA
tgagaaagaacttta

SEQ ID NO: 7018 - DNA, 15 bp, synthetic construct
  source 1..15: mol_type = other DNA
gggtgttgagttgag

SEQ ID NO: 7019 - DNA, 15 bp, synthetic construct
  source 1..15: mol_type = other DNA
acattttgccatcag

SEQ ID NO: 7020 - DNA, 15 bp, synthetic construct
  source 1..15: mol_type = other DNA
gtagtgttgcagcat

SEQ ID NO: 7021 - DNA, 15 bp, synthetic construct
  source 1..15: mol_type = other DNA
gtgaaaaactgtgtc

SEQ ID NO: 7022 - DNA, 15 bp, synthetic construct
  source 1..15: mol_type = other DNA
gctctaaatatggtc

SEQ ID NO: 7023 - DNA, 15 bp, synthetic construct
  source 1..15: mol_type = other DNA
agaaagtcctaggtc

SEQ ID NO: 7024 - DNA, 15 bp, synthetic construct
  source 1..15: mol_type = other DNA
taggttctctggact

SEQ ID NO: 7025 - DNA, 15 bp, synthetic construct
  source 1..15: mol_type = other DNA
tttccaacaaaacac

SEQ ID NO: 7026 - DNA, 15 bp, synthetic construct
  source 1..15: mol_type = other DNA
tttggagtgatgtcc

SEQ ID NO: 7027 - DNA, 15 bp, synthetic construct
  source 1..15: mol_type = other DNA
tgtcaacttagccaa

SEQ ID NO: 7028 - DNA, 15 bp, synthetic construct
  source 1..15: mol_type = other DNA
ctcgggctgctttag

SEQ ID NO: 7029 - DNA, 15 bp, synthetic construct
  source 1..15: mol_type = other DNA
caatctcttccatcg

SEQ ID NO: 7030 - DNA, 15 bp, synthetic construct
  source 1..15: mol_type = other DNA
ctaaataacatcaca

SEQ ID NO: 7031 - DNA, 15 bp, synthetic construct
  source 1..15: mol_type = other DNA
ggtagtgtactctgc

SEQ ID NO: 7032 - DNA, 15 bp, synthetic construct
  source 1..15: mol_type = other DNA
agttcctactcaact

SEQ ID NO: 7033 - DNA, 15 bp, synthetic construct
  source 1..15: mol_type = other DNA
acttgactccatagg

SEQ ID NO: 7034 - DNA, 15 bp, synthetic construct
  source 1..15: mol_type = other DNA
tcaggcattgaaact

SEQ ID NO: 7035 - DNA, 15 bp, synthetic construct
  source 1..15: mol_type = other DNA
tttccctcctccatc

SEQ ID NO: 7036 - DNA, 15 bp, synthetic construct
  source 1..15: mol_type = other DNA
agggcaacttttctt

SEQ ID NO: 7037 - DNA, 15 bp, synthetic construct
  source 1..15: mol_type = other DNA
gcttgtgttagtgtc

SEQ ID NO: 7038 - DNA, 15 bp, synthetic construct
  source 1..15: mol_type = other DNA
actatcccgcccaaa

SEQ ID NO: 7039 - DNA, 15 bp, synthetic construct
  source 1..15: mol_type = other DNA
ttgaatcagtctgta

SEQ ID NO: 7040 - DNA, 15 bp, synthetic construct
  source 1..15: mol_type = other DNA
caccccatttaacct

SEQ ID NO: 7041 - DNA, 15 bp, synthetic construct
  source 1..15: mol_type = other DNA
atgctttgatatgca

SEQ ID NO: 7042 - DNA, 15 bp, synthetic construct
  source 1..15: mol_type = other DNA
aggaaagttcccaat

SEQ ID NO: 7043 - DNA, 15 bp, synthetic construct
  source 1..15: mol_type = other DNA
ccgagaatgatggaa

SEQ ID NO: 7044 - DNA, 15 bp, synthetic construct
  source 1..15: mol_type = other DNA
gccttaggttctctc

SEQ ID NO: 7045 - DNA, 15 bp, synthetic construct
  source 1..15: mol_type = other DNA
tgtgtgtggcatctt

SEQ ID NO: 7046 - DNA, 15 bp, synthetic construct
  source 1..15: mol_type = other DNA
aggaagcaaatgttt

SEQ ID NO: 7047 - DNA, 15 bp, synthetic construct
  source 1..15: mol_type = other DNA
gagctaccaattcat

SEQ ID NO: 7048 - DNA, 15 bp, synthetic construct
  source 1..15: mol_type = other DNA
gagctgcaaacattg

SEQ ID NO: 7049 - DNA, 15 bp, synthetic construct
  source 1..15: mol_type = other DNA
catagcctctgacgt

SEQ ID NO: 7050 - DNA, 15 bp, synthetic construct
  source 1..15: mol_type = other DNA
ctggaaatagaggta

SEQ ID NO: 7051 - DNA, 15 bp, synthetic construct
  source 1..15: mol_type = other DNA
aatgactcctatgtg

SEQ ID NO: 7052 - DNA, 15 bp, synthetic construct
  source 1..15: mol_type = other DNA
acttctacattatgc

SEQ ID NO: 7053 - DNA, 15 bp, synthetic construct
  source 1..15: mol_type = other DNA
ctgaaattcttagga

SEQ ID NO: 7054 - DNA, 15 bp, synthetic construct
  source 1..15: mol_type = other DNA
ccactgtgctgatta

SEQ ID NO: 7055 - DNA, 15 bp, synthetic construct
  source 1..15: mol_type = other DNA
ataccatcggctcat

SEQ ID NO: 7056 - DNA, 15 bp, synthetic construct
  source 1..15: mol_type = other DNA
ttgagtttgggagac

SEQ ID NO: 7057 - DNA, 15 bp, synthetic construct
  source 1..15: mol_type = other DNA
agagtgcaattcccc

SEQ ID NO: 7058 - DNA, 15 bp, synthetic construct
  source 1..15: mol_type = other DNA
ccatcttcccatcgc

SEQ ID NO: 7059 - DNA, 15 bp, synthetic construct
  source 1..15: mol_type = other DNA
accccctcacagtaa

SEQ ID NO: 7060 - DNA, 15 bp, synthetic construct
  source 1..15: mol_type = other DNA
cagtcatccttctgg

SEQ ID NO: 7061 - DNA, 15 bp, synthetic construct
  source 1..15: mol_type = other DNA
cagacatattagcaa

SEQ ID NO: 7062 - DNA, 15 bp, synthetic construct
  source 1..15: mol_type = other DNA
gaaatcacaaatagc

SEQ ID NO: 7063 - DNA, 15 bp, synthetic construct
  source 1..15: mol_type = other DNA
acttcctcccacatg

SEQ ID NO: 7064 - DNA, 15 bp, synthetic construct
  source 1..15: mol_type = other DNA
tgtgacattgtgaac

SEQ ID NO: 7065 - DNA, 15 bp, synthetic construct
  source 1..15: mol_type = other DNA
ctcgcctccgttaag

SEQ ID NO: 7066 - DNA, 15 bp, synthetic construct
  source 1..15: mol_type = other DNA
tcactaacacatgcc

SEQ ID NO: 7067 - DNA, 15 bp, synthetic construct
  source 1..15: mol_type = other DNA
tggcaaattaatcca

SEQ ID NO: 7068 - DNA, 15 bp, synthetic construct
  source 1..15: mol_type = other DNA
agtttgctcttctcc

SEQ ID NO: 7069 - DNA, 15 bp, synthetic construct
  source 1..15: mol_type = other DNA
aatgcaagtggtcac

SEQ ID NO: 7070 - DNA, 15 bp, synthetic construct
  source 1..15: mol_type = other DNA
agaggctattggatt

SEQ ID NO: 7071 - DNA, 15 bp, synthetic construct
  source 1..15: mol_type = other DNA
tttttataggaccaa

SEQ ID NO: 7072 - DNA, 15 bp, synthetic construct
  source 1..15: mol_type = other DNA
taagtcagtcctact

SEQ ID NO: 7073 - DNA, 15 bp, synthetic construct
  source 1..15: mol_type = other DNA
tggtcactcacccag

SEQ ID NO: 7074 - DNA, 15 bp, synthetic construct
  source 1..15: mol_type = other DNA
tttttgtctgcctgt

SEQ ID NO: 7075 - DNA, 15 bp, synthetic construct
  source 1..15: mol_type = other DNA
acactagcttcagag

SEQ ID NO: 7076 - DNA, 15 bp, synthetic construct
  source 1..15: mol_type = other DNA
cagtgaacaaaacga

SEQ ID NO: 7077 - DNA, 15 bp, synthetic construct
  source 1..15: mol_type = other DNA
caacatcaagatccg

SEQ ID NO: 7078 - DNA, 15 bp, synthetic construct
  source 1..15: mol_type = other DNA
tgatagtgagaggtc

SEQ ID NO: 7079 - DNA, 15 bp, synthetic construct
  source 1..15: mol_type = other DNA
tcactgcaagtctcc

SEQ ID NO: 7080 - DNA, 15 bp, synthetic construct
  source 1..15: mol_type = other DNA
acacgtgtcagcttg

SEQ ID NO: 7081 - DNA, 15 bp, synthetic construct
  source 1..15: mol_type = other DNA
aatcaatgagtccat

SEQ ID NO: 7082 - DNA, 15 bp, synthetic construct
  source 1..15: mol_type = other DNA
cggttccatgacaga

SEQ ID NO: 7083 - DNA, 15 bp, synthetic construct
  source 1..15: mol_type = other DNA
ctagaagggatacta

SEQ ID NO: 7084 - DNA, 15 bp, synthetic construct
  source 1..15: mol_type = other DNA
tctgtatcaaaacct

SEQ ID NO: 7085 - DNA, 15 bp, synthetic construct
  source 1..15: mol_type = other DNA
gtgagaattgttgca

SEQ ID NO: 7086 - DNA, 15 bp, synthetic construct
  source 1..15: mol_type = other DNA
ggacatccttcagac

SEQ ID NO: 7087 - DNA, 15 bp, synthetic construct
  source 1..15: mol_type = other DNA
taagcaacaagacag

SEQ ID NO: 7088 - DNA, 15 bp, synthetic construct
  source 1..15: mol_type = other DNA
ctctagtttctcaag

SEQ ID NO: 7089 - DNA, 15 bp, synthetic construct
  source 1..15: mol_type = other DNA
tccaccagattgccc

SEQ ID NO: 7090 - DNA, 15 bp, synthetic construct
  source 1..15: mol_type = other DNA
ggaccttgcactttc

SEQ ID NO: 7091 - DNA, 15 bp, synthetic construct
  source 1..15: mol_type = other DNA
gagagacatagtacc

SEQ ID NO: 7092 - DNA, 15 bp, synthetic construct
  source 1..15: mol_type = other DNA
aaccttctccctctg

SEQ ID NO: 7093 - DNA, 15 bp, synthetic construct
  source 1..15: mol_type = other DNA
gttacgtttgtgtct

SEQ ID NO: 7094 - DNA, 15 bp, synthetic construct
  source 1..15: mol_type = other DNA
acaagggctctaacc

SEQ ID NO: 7095 - DNA, 15 bp, synthetic construct
  source 1..15: mol_type = other DNA
ctgaggtgggtaact

SEQ ID NO: 7096 - DNA, 15 bp, synthetic construct
  source 1..15: mol_type = other DNA
gcttcttgcactaat

SEQ ID NO: 7097 - DNA, 15 bp, synthetic construct
  source 1..15: mol_type = other DNA
ataccaatacctacc

SEQ ID NO: 7098 - DNA, 15 bp, synthetic construct
  source 1..15: mol_type = other DNA
aagctctgtcttttt

SEQ ID NO: 7099 - DNA, 15 bp, synthetic construct
  source 1..15: mol_type = other DNA
tcagaatgaagccac

SEQ ID NO: 7100 - DNA, 15 bp, synthetic construct
  source 1..15: mol_type = other DNA
agtcagccaatccct

SEQ ID NO: 7101 - DNA, 15 bp, synthetic construct
  source 1..15: mol_type = other DNA
tcagaatgaagccac

SEQ ID NO: 7102 - DNA, 15 bp, synthetic construct
  source 1..15: mol_type = other DNA
agtcagccaatccct

SEQ ID NO: 7103 - DNA, 15 bp, synthetic construct
  source 1..15: mol_type = other DNA
cctcaatggttgttt

SEQ ID NO: 7104 - DNA, 15 bp, synthetic construct
  source 1..15: mol_type = other DNA
taattagcaccatca

SEQ ID NO: 7105 - DNA, 15 bp, synthetic construct
  source 1..15: mol_type = other DNA
cctcaatggttgttt

SEQ ID NO: 7106 - DNA, 15 bp, synthetic construct
  source 1..15: mol_type = other DNA
taattagcaccatca

SEQ ID NO: 7107 - DNA, 15 bp, synthetic construct
  source 1..15: mol_type = other DNA
actttattccttcca

SEQ ID NO: 7108 - DNA, 15 bp, synthetic construct
  source 1..15: mol_type = other DNA
ggagccatgtactac

SEQ ID NO: 7109 - DNA, 15 bp, synthetic construct
  source 1..15: mol_type = other DNA
tctggacaccaatcc

SEQ ID NO: 7110 - DNA, 15 bp, synthetic construct
  source 1..15: mol_type = other DNA
acttagtgtttgaga

SEQ ID NO: 7111 - DNA, 15 bp, synthetic construct
  source 1..15: mol_type = other DNA
tcatgggtatgggac

SEQ ID NO: 7112 - DNA, 15 bp, synthetic construct
  source 1..15: mol_type = other DNA
aagtacaagggcagt

SEQ ID NO: 7113 - DNA, 15 bp, synthetic construct
  source 1..15: mol_type = other DNA
atctgtctcctagcc

SEQ ID NO: 7114 - DNA, 15 bp, synthetic construct
  source 1..15: mol_type = other DNA
gccctgtaatgttta

SEQ ID NO: 7115 - DNA, 15 bp, synthetic construct
  source 1..15: mol_type = other DNA
aagccagtcaaatag

SEQ ID NO: 7116 - DNA, 15 bp, synthetic construct
  source 1..15: mol_type = other DNA
atttctttaattcgc

SEQ ID NO: 7117 - DNA, 15 bp, synthetic construct
  source 1..15: mol_type = other DNA
gccatacagacatat

SEQ ID NO: 7118 - DNA, 15 bp, synthetic construct
  source 1..15: mol_type = other DNA
tctatatttggaagc

SEQ ID NO: 7119 - DNA, 15 bp, synthetic construct
  source 1..15: mol_type = other DNA
tcatcaagaaatggc

SEQ ID NO: 7120 - DNA, 15 bp, synthetic construct
  source 1..15: mol_type = other DNA
gttcccaatcttcct

SEQ ID NO: 7121 - DNA, 15 bp, synthetic construct
  source 1..15: mol_type = other DNA
tgagagagataggta

SEQ ID NO: 7122 - DNA, 15 bp, synthetic construct
  source 1..15: mol_type = other DNA
acaggtttgggtggt

SEQ ID NO: 7123 - DNA, 15 bp, synthetic construct
  source 1..15: mol_type = other DNA
accaatcttgcaatt

SEQ ID NO: 7124 - DNA, 15 bp, synthetic construct
  source 1..15: mol_type = other DNA
tcctggttaaagagt

SEQ ID NO: 7125 - DNA, 15 bp, synthetic construct
  source 1..15: mol_type = other DNA
atccatgtggacgaa

SEQ ID NO: 7126 - DNA, 15 bp, synthetic construct
  source 1..15: mol_type = other DNA
aaatccagaggagag

SEQ ID NO: 7127 - DNA, 15 bp, synthetic construct
  source 1..15: mol_type = other DNA
catcagggaagctgg

SEQ ID NO: 7128 - DNA, 15 bp, synthetic construct
  source 1..15: mol_type = other DNA
ttgagtatatacaac

SEQ ID NO: 7129 - DNA, 15 bp, synthetic construct
  source 1..15: mol_type = other DNA
aaaccactcacctag

SEQ ID NO: 7130 - DNA, 15 bp, synthetic construct
  source 1..15: mol_type = other DNA
agtaaatataagcat

SEQ ID NO: 7131 - DNA, 15 bp, synthetic construct
  source 1..15: mol_type = other DNA
cccttagactatgta

SEQ ID NO: 7132 - DNA, 15 bp, synthetic construct
  source 1..15: mol_type = other DNA
tttaaaagtgcaagg

SEQ ID NO: 7133 - DNA, 15 bp, synthetic construct
  source 1..15: mol_type = other DNA
aaatccctcatcctg

SEQ ID NO: 7134 - DNA, 15 bp, synthetic construct
  source 1..15: mol_type = other DNA
ctgtcctgtgtcaat

SEQ ID NO: 7135 - DNA, 15 bp, synthetic construct
  source 1..15: mol_type = other DNA
gaaaaggaagaaaac

SEQ ID NO: 7136 - DNA, 15 bp, synthetic construct
  source 1..15: mol_type = other DNA
caggttaaatattgc

SEQ ID NO: 7137 - DNA, 15 bp, synthetic construct
  source 1..15: mol_type = other DNA
cctattgtgttctta

SEQ ID NO: 7138 - DNA, 15 bp, synthetic construct
  source 1..15: mol_type = other DNA
aaagctatgctgctc

SEQ ID NO: 7139 - DNA, 15 bp, synthetic construct
  source 1..15: mol_type = other DNA
atgtgctatgtatat

SEQ ID NO: 7140 - DNA, 15 bp, synthetic construct
  source 1..15: mol_type = other DNA
ctaggaagcttaact

SEQ ID NO: 7141 - DNA, 15 bp, synthetic construct
  source 1..15: mol_type = other DNA
tatgtgcagatactt

SEQ ID NO: 7142 - DNA, 15 bp, synthetic construct
  source 1..15: mol_type = other DNA
ttacacagcccctgt

SEQ ID NO: 7143 - DNA, 15 bp, synthetic construct
  source 1..15: mol_type = other DNA
gccgatccgtcatgg

SEQ ID NO: 7144 - DNA, 15 bp, synthetic construct
  source 1..15: mol_type = other DNA
tatccatgcagattt

SEQ ID NO: 7145 - DNA, 15 bp, synthetic construct
  source 1..15: mol_type = other DNA
gcatgatatactgga

SEQ ID NO: 7146 - DNA, 15 bp, synthetic construct
  source 1..15: mol_type = other DNA
cctcaaccgatacag

SEQ ID NO: 7147 - DNA, 15 bp, synthetic construct
  source 1..15: mol_type = other DNA
gcctgttgtaggtct

SEQ ID NO: 7148 - DNA, 15 bp, synthetic construct
  source 1..15: mol_type = other DNA
tctttacatttcaac

SEQ ID NO: 7149 - DNA, 15 bp, synthetic construct
  source 1..15: mol_type = other DNA
ttagtgcctgagttt

SEQ ID NO: 7150 - DNA, 15 bp, synthetic construct
  source 1..15: mol_type = other DNA
ttgttttgagatgct

SEQ ID NO: 7151 - DNA, 15 bp, synthetic construct
  source 1..15: mol_type = other DNA
agaaatgatttcaat

SEQ ID NO: 7152 - DNA, 15 bp, synthetic construct
  source 1..15: mol_type = other DNA
gttttgcaaccaagt

SEQ ID NO: 7153 - DNA, 15 bp, synthetic construct
  source 1..15: mol_type = other DNA
ctcttcacctgaaat

SEQ ID NO: 7154 - DNA, 15 bp, synthetic construct
  source 1..15: mol_type = other DNA
tgataaattcagctt

SEQ ID NO: 7155 - DNA, 15 bp, synthetic construct
  source 1..15: mol_type = other DNA
acagatgcattagag

SEQ ID NO: 7156 - DNA, 15 bp, synthetic construct
  source 1..15: mol_type = other DNA
gttggacatgccaag

SEQ ID NO: 7157 - DNA, 15 bp, synthetic construct
  source 1..15: mol_type = other DNA
tcacagatcaaacag

SEQ ID NO: 7158 - DNA, 15 bp, synthetic construct
  source 1..15: mol_type = other DNA
ctttgcttattcacg

SEQ ID NO: 7159 - DNA, 15 bp, synthetic construct
  source 1..15: mol_type = other DNA
gtttgaccgaaaatg

SEQ ID NO: 7160 - DNA, 15 bp, synthetic construct
  source 1..15: mol_type = other DNA
tggaagcgctttcat

SEQ ID NO: 7161 - DNA, 15 bp, synthetic construct
  source 1..15: mol_type = other DNA
gatgatcatctcagt

SEQ ID NO: 7162 - DNA, 15 bp, synthetic construct
  source 1..15: mol_type = other DNA
tttccctcaccagtt

SEQ ID NO: 7163 - DNA, 15 bp, synthetic construct
  source 1..15: mol_type = other DNA
ataggcaggaagggg

SEQ ID NO: 7164 - DNA, 15 bp, synthetic construct
  source 1..15: mol_type = other DNA
cgctttctcggtgga

SEQ ID NO: 7165 - DNA, 15 bp, synthetic construct
  source 1..15: mol_type = other DNA
agaagaacccttttc

SEQ ID NO: 7166 - DNA, 15 bp, synthetic construct
  source 1..15: mol_type = other DNA
tgagtgtatatgaga

SEQ ID NO: 7167 - DNA, 15 bp, synthetic construct
  source 1..15: mol_type = other DNA
cctaggattttcagc

SEQ ID NO: 7168 - DNA, 15 bp, synthetic construct
  source 1..15: mol_type = other DNA
gtgtacctttaaaac

SEQ ID NO: 7169 - DNA, 15 bp, synthetic construct
  source 1..15: mol_type = other DNA
tggcctgttacttaa

SEQ ID NO: 7170 - DNA, 15 bp, synthetic construct
  source 1..15: mol_type = other DNA
agttctattctttga

SEQ ID NO: 7171 - DNA, 15 bp, synthetic construct
  source 1..15: mol_type = other DNA
ggtacctaaaacagg

SEQ ID NO: 7172 - DNA, 15 bp, synthetic construct
  source 1..15: mol_type = other DNA
actggtactttctga

SEQ ID NO: 7173 - DNA, 15 bp, synthetic construct
  source 1..15: mol_type = other DNA
aaccacacaataagc

SEQ ID NO: 7174 - DNA, 15 bp, synthetic construct
  source 1..15: mol_type = other DNA
gaaggagcagacttt

SEQ ID NO: 7175 - DNA, 15 bp, synthetic construct
  source 1..15: mol_type = other DNA
ctgaaatgccatatt

SEQ ID NO: 7176 - DNA, 15 bp, synthetic construct
  source 1..15: mol_type = other DNA
tgagtgtttttgaat

SEQ ID NO: 7177 - DNA, 15 bp, synthetic construct
  source 1..15: mol_type = other DNA
gacggtttataacat

SEQ ID NO: 7178 - DNA, 15 bp, synthetic construct
  source 1..15: mol_type = other DNA
agatcttggtgcata

SEQ ID NO: 7179 - DNA, 15 bp, synthetic construct
  source 1..15: mol_type = other DNA
acctgaagccattca

SEQ ID NO: 7180 - DNA, 15 bp, synthetic construct
  source 1..15: mol_type = other DNA
gaagtttggcagaga

SEQ ID NO: 7181 - DNA, 15 bp, synthetic construct
  source 1..15: mol_type = other DNA
gattgcaactcattt

SEQ ID NO: 7182 - DNA, 15 bp, synthetic construct
  source 1..15: mol_type = other DNA
aactgctcagtagag

SEQ ID NO: 7183 - DNA, 15 bp, synthetic construct
  source 1..15: mol_type = other DNA
acctctgtccagtaa

SEQ ID NO: 7184 - DNA, 15 bp, synthetic construct
  source 1..15: mol_type = other DNA
tgatctcgtgagggt

SEQ ID NO: 7185 - DNA, 15 bp, synthetic construct
  source 1..15: mol_type = other DNA
taaatcaggagccag

SEQ ID NO: 7186 - DNA, 15 bp, synthetic construct
  source 1..15: mol_type = other DNA
tcaggtagtgtcaga

SEQ ID NO: 7187 - DNA, 15 bp, synthetic construct
  source 1..15: mol_type = other DNA
tcatgaaggacgtgg

SEQ ID NO: 7188 - DNA, 15 bp, synthetic construct
  source 1..15: mol_type = other DNA
tggatacccccaggt

SEQ ID NO: 7189 - DNA, 15 bp, synthetic construct
  source 1..15: mol_type = other DNA
tgagtcgctttgccc

SEQ ID NO: 7190 - DNA, 15 bp, synthetic construct
  source 1..15: mol_type = other DNA
cgatcgcggccgttc

SEQ ID NO: 7191 - DNA, 15 bp, synthetic construct
  source 1..15: mol_type = other DNA
gagcgcgacggctgc

SEQ ID NO: 7192 - DNA, 15 bp, synthetic construct
  source 1..15: mol_type = other DNA
tggccgcggacctac

SEQ ID NO: 7193 - DNA, 15 bp, synthetic construct
  source 1..15: mol_type = other DNA
cttgctggcccctat

SEQ ID NO: 7194 - DNA, 15 bp, synthetic construct
  source 1..15: mol_type = other DNA
tgtagggcacttgca

SEQ ID NO: 7195 - DNA, 15 bp, synthetic construct
  source 1..15: mol_type = other DNA
ggccaggcctagtgg

SEQ ID NO: 7196 - DNA, 15 bp, synthetic construct
  source 1..15: mol_type = other DNA
catactgacaatacc

SEQ ID NO: 7197 - DNA, 15 bp, synthetic construct
  source 1..15: mol_type = other DNA
cttttctccctacag

SEQ ID NO: 7198 - DNA, 15 bp, synthetic construct
  source 1..15: mol_type = other DNA
ggaaaaaggctcaag

SEQ ID NO: 7199 - DNA, 15 bp, synthetic construct
  source 1..15: mol_type = other DNA
attaccccatctgta

SEQ ID NO: 7200 - DNA, 15 bp, synthetic construct
  source 1..15: mol_type = other DNA
cttacctggttctat

SEQ ID NO: 7201 - DNA, 15 bp, synthetic construct
  source 1..15: mol_type = other DNA
ttgcaaaggtcgctg

SEQ ID NO: 7202 - DNA, 15 bp, synthetic construct
  source 1..15: mol_type = other DNA
aacgtgtatgtatgc

SEQ ID NO: 7203 - DNA, 15 bp, synthetic construct
  source 1..15: mol_type = other DNA
ctgtgttcactttgg

SEQ ID NO: 7204 - DNA, 15 bp, synthetic construct
  source 1..15: mol_type = other DNA
tgtaaagccccgcta

SEQ ID NO: 7205 - DNA, 15 bp, synthetic construct
  source 1..15: mol_type = other DNA
tccagagtcatgtcc

SEQ ID NO: 7206 - DNA, 15 bp, synthetic construct
  source 1..15: mol_type = other DNA
accctgctgggcact

SEQ ID NO: 7207 - DNA, 15 bp, synthetic construct
  source 1..15: mol_type = other DNA
ttgggtagaagaacc

SEQ ID NO: 7208 - DNA, 15 bp, synthetic construct
  source 1..15: mol_type = other DNA
taactcaaatattgc

SEQ ID NO: 7209 - DNA, 15 bp, synthetic construct
  source 1..15: mol_type = other DNA
tcttcactggacctg

SEQ ID NO: 7210 - DNA, 15 bp, synthetic construct
  source 1..15: mol_type = other DNA
gcctgcctagtcaat

SEQ ID NO: 7211 - DNA, 15 bp, synthetic construct
  source 1..15: mol_type = other DNA
taagccaattgtcag

SEQ ID NO: 7212 - DNA, 15 bp, synthetic construct
  source 1..15: mol_type = other DNA
ttaactacctattgg

SEQ ID NO: 7213 - DNA, 15 bp, synthetic construct
  source 1..15: mol_type = other DNA
cttcagttatcggtt

SEQ ID NO: 7214 - DNA, 15 bp, synthetic construct
  source 1..15: mol_type = other DNA
tggttctcctttgta

SEQ ID NO: 7215 - DNA, 15 bp, synthetic construct
  source 1..15: mol_type = other DNA
aatctcatggcataa

SEQ ID NO: 7216 - DNA, 15 bp, synthetic construct
  source 1..15: mol_type = other DNA
gccacagacacacta

SEQ ID NO: 7217 - DNA, 15 bp, synthetic construct
  source 1..15: mol_type = other DNA
gaatgtttgcatgat

SEQ ID NO: 7218 - DNA, 15 bp, synthetic construct
  source 1..15: mol_type = other DNA
aaatgctaaagctca

SEQ ID NO: 7219 - DNA, 15 bp, synthetic construct
  source 1..15: mol_type = other DNA
ttgtcagccatcttt

SEQ ID NO: 7220 - DNA, 15 bp, synthetic construct
  source 1..15: mol_type = other DNA
gttttgttgtagtct

SEQ ID NO: 7221 - DNA, 15 bp, synthetic construct
  source 1..15: mol_type = other DNA
gttacaccagtgtta

SEQ ID NO: 7222 - DNA, 15 bp, synthetic construct
  source 1..15: mol_type = other DNA
gttcagtttgatgac

SEQ ID NO: 7223 - DNA, 15 bp, synthetic construct
  source 1..15: mol_type = other DNA
tgtggaaggtatcac

SEQ ID NO: 7224 - DNA, 15 bp, synthetic construct
  source 1..15: mol_type = other DNA
aagtaaactttcttc

SEQ ID NO: 7225 - DNA, 15 bp, synthetic construct
  source 1..15: mol_type = other DNA
aagttctgctctgca

SEQ ID NO: 7226 - DNA, 15 bp, synthetic construct
  source 1..15: mol_type = other DNA
ggaaggtattcttaa

SEQ ID NO: 7227 - DNA, 15 bp, synthetic construct
  source 1..15: mol_type = other DNA
ggtgtcattacaggg

SEQ ID NO: 7228 - DNA, 15 bp, synthetic construct
  source 1..15: mol_type = other DNA
aaagatttcgggcaa

SEQ ID NO: 7229 - DNA, 15 bp, synthetic construct
  source 1..15: mol_type = other DNA
tttgttcccctccag

SEQ ID NO: 7230 - DNA, 15 bp, synthetic construct
  source 1..15: mol_type = other DNA
gattattgggatacg

SEQ ID NO: 7231 - DNA, 15 bp, synthetic construct
  source 1..15: mol_type = other DNA
tctttgctgtttgca

SEQ ID NO: 7232 - DNA, 15 bp, synthetic construct
  source 1..15: mol_type = other DNA
agaaagggcccaatg

SEQ ID NO: 7233 - DNA, 15 bp, synthetic construct
  source 1..15: mol_type = other DNA
tgttggtttaacaaa

SEQ ID NO: 7234 - DNA, 15 bp, synthetic construct
  source 1..15: mol_type = other DNA
ttgcatatcattttt

SEQ ID NO: 7235 - DNA, 15 bp, synthetic construct
  source 1..15: mol_type = other DNA
gaaatgcactgataa

SEQ ID NO: 7236 - DNA, 15 bp, synthetic construct
  source 1..15: mol_type = other DNA
agaaggtaaaaatct

SEQ ID NO: 7237 - DNA, 15 bp, synthetic construct
  source 1..15: mol_type = other DNA
ctactatttgtttga

SEQ ID NO: 7238 - DNA, 15 bp, synthetic construct
  source 1..15: mol_type = other DNA
ccaaacttcttgacg

SEQ ID NO: 7239 - DNA, 15 bp, synthetic construct
  source 1..15: mol_type = other DNA
gtctctcagtcctta

SEQ ID NO: 7240 - DNA, 15 bp, synthetic construct
  source 1..15: mol_type = other DNA
tttcatcaggtggtc

SEQ ID NO: 7241 - DNA, 15 bp, synthetic construct
  source 1..15: mol_type = other DNA
agtgtatcacactat

SEQ ID NO: 7242 - DNA, 15 bp, synthetic construct
  source 1..15: mol_type = other DNA
acacataaagaggtg

SEQ ID NO: 7243 - DNA, 15 bp, synthetic construct
  source 1..15: mol_type = other DNA
gcctgatatctgaga

SEQ ID NO: 7244 - DNA, 15 bp, synthetic construct
  source 1..15: mol_type = other DNA
agaaagaaaacaaaa

SEQ ID NO: 7245 - DNA, 15 bp, synthetic construct
  source 1..15: mol_type = other DNA
aggtttaagatggta

SEQ ID NO: 7246 - DNA, 15 bp, synthetic construct
  source 1..15: mol_type = other DNA
aaattcattaaaatt

SEQ ID NO: 7247 - DNA, 15 bp, synthetic construct
  source 1..15: mol_type = other DNA
cttgttcttttgaaa

SEQ ID NO: 7248 - DNA, 15 bp, synthetic construct
  source 1..15: mol_type = other DNA
ttgactcaactggat

SEQ ID NO: 7249 - DNA, 15 bp, synthetic construct
  source 1..15: mol_type = other DNA
tattgctctcaatct

SEQ ID NO: 7250 - DNA, 15 bp, synthetic construct
  source 1..15: mol_type = other DNA
atctttacagcttgt

SEQ ID NO: 7251 - DNA, 15 bp, synthetic construct
  source 1..15: mol_type = other DNA
gaagagtcatccgta

SEQ ID NO: 7252 - DNA, 15 bp, synthetic construct
  source 1..15: mol_type = other DNA
ctcactgtaatgtca

SEQ ID NO: 7253 - DNA, 15 bp, synthetic construct
  source 1..15: mol_type = other DNA
gtgttctcttggtaa

SEQ ID NO: 7254 - DNA, 15 bp, synthetic construct
  source 1..15: mol_type = other DNA
aaaagattcatggtg

SEQ ID NO: 7255 - DNA, 15 bp, synthetic construct
  source 1..15: mol_type = other DNA
aattccatttggttt

SEQ ID NO: 7256 - DNA, 15 bp, synthetic construct
  source 1..15: mol_type = other DNA
aggcaaactagaaga

SEQ ID NO: 7257 - DNA, 15 bp, synthetic construct
  source 1..15: mol_type = other DNA
tttacttgcctctct

SEQ ID NO: 7258 - DNA, 15 bp, synthetic construct
  source 1..15: mol_type = other DNA
cagctctcttttact

SEQ ID NO: 7259 - DNA, 15 bp, synthetic construct
  source 1..15: mol_type = other DNA
aaagaaaaccccaac

SEQ ID NO: 7260 - DNA, 15 bp, synthetic construct
  source 1..15: mol_type = other DNA
tctctccccattcag

SEQ ID NO: 7261 - DNA, 15 bp, synthetic construct
  source 1..15: mol_type = other DNA
aaaatcaaagtacat

SEQ ID NO: 7262 - DNA, 15 bp, synthetic construct
  source 1..15: mol_type = other DNA
tgcccctaccatcgt

SEQ ID NO: 7263 - DNA, 15 bp, synthetic construct
  source 1..15: mol_type = other DNA
taaaccaggaaggga

SEQ ID NO: 7264 - DNA, 15 bp, synthetic construct
  source 1..15: mol_type = other DNA
tggtacagttgtgat

SEQ ID NO: 7265 - DNA, 15 bp, synthetic construct
  source 1..15: mol_type = other DNA
tctacaatggcactg

SEQ ID NO: 7266 - DNA, 15 bp, synthetic construct
  source 1..15: mol_type = other DNA
gctgtgtgagtcata

SEQ ID NO: 7267 - DNA, 15 bp, synthetic construct
  source 1..15: mol_type = other DNA
ttatccgaagagaga

SEQ ID NO: 7268 - DNA, 15 bp, synthetic construct
  source 1..15: mol_type = other DNA
gatgcccttaaatgt

SEQ ID NO: 7269 - DNA, 15 bp, synthetic construct
  source 1..15: mol_type = other DNA
acacaacaagcatct

SEQ ID NO: 7270 - DNA, 15 bp, synthetic construct
  source 1..15: mol_type = other DNA
tgcattagtaatcca

SEQ ID NO: 7271 - DNA, 15 bp, synthetic construct
  source 1..15: mol_type = other DNA
aagtacacatcagat

SEQ ID NO: 7272 - DNA, 15 bp, synthetic construct
  source 1..15: mol_type = other DNA
aatgctgatttaggt

SEQ ID NO: 7273 - DNA, 15 bp, synthetic construct
  source 1..15: mol_type = other DNA
caattaaggttttag

SEQ ID NO: 7274 - DNA, 15 bp, synthetic construct
  source 1..15: mol_type = other DNA
aaggctcttttcaga

SEQ ID NO: 7275 - DNA, 15 bp, synthetic construct
  source 1..15: mol_type = other DNA
agtttcaagcctctg

SEQ ID NO: 7276 - DNA, 15 bp, synthetic construct
  source 1..15: mol_type = other DNA
gttttagggcttgat

SEQ ID NO: 7277 - DNA, 15 bp, synthetic construct
  source 1..15: mol_type = other DNA
ataagggcacaatta

SEQ ID NO: 7278 - DNA, 15 bp, synthetic construct
  source 1..15: mol_type = other DNA
agccatgtattctga

SEQ ID NO: 7279 - DNA, 15 bp, synthetic construct
  source 1..15: mol_type = other DNA
atgtctcgaatgggt

SEQ ID NO: 7280 - DNA, 15 bp, synthetic construct
  source 1..15: mol_type = other DNA
gtggaatgtaaaata

SEQ ID NO: 7281 - DNA, 15 bp, synthetic construct
  source 1..15: mol_type = other DNA
cacttcttcaaaccc

SEQ ID NO: 7282 - DNA, 15 bp, synthetic construct
  source 1..15: mol_type = other DNA
tacatgattaagaca

SEQ ID NO: 7283 - DNA, 15 bp, synthetic construct
  source 1..15: mol_type = other DNA
cttatcctgtcaaca

SEQ ID NO: 7284 - DNA, 15 bp, synthetic construct
  source 1..15: mol_type = other DNA
cagtggaattggaaa

SEQ ID NO: 7285 - DNA, 15 bp, synthetic construct
  source 1..15: mol_type = other DNA
ggatttttccaactt

SEQ ID NO: 7286 - DNA, 15 bp, synthetic construct
  source 1..15: mol_type = other DNA
tttcccccgatttcc

SEQ ID NO: 7287 - DNA, 15 bp, synthetic construct
  source 1..15: mol_type = other DNA
ccctctcaagcctaa

SEQ ID NO: 7288 - DNA, 15 bp, synthetic construct
  source 1..15: mol_type = other DNA
ttgtttacacggcta

SEQ ID NO: 7289 - DNA, 15 bp, synthetic construct
  source 1..15: mol_type = other DNA
ttctctcatctcaac

SEQ ID NO: 7290 - DNA, 15 bp, synthetic construct
  source 1..15: mol_type = other DNA
cttaaggttcattgg

SEQ ID NO: 7291 - DNA, 15 bp, synthetic construct
  source 1..15: mol_type = other DNA
gagtagttacatcag

SEQ ID NO: 7292 - DNA, 15 bp, synthetic construct
  source 1..15: mol_type = other DNA
tcttctgtctggaaa

SEQ ID NO: 7293 - DNA, 15 bp, synthetic construct
  source 1..15: mol_type = other DNA
ctccacgtggactac

SEQ ID NO: 7294 - DNA, 15 bp, synthetic construct
  source 1..15: mol_type = other DNA
cttgccgtatcccaa

SEQ ID NO: 7295 - DNA, 15 bp, synthetic construct
  source 1..15: mol_type = other DNA
cattgtgggagaaat

SEQ ID NO: 7296 - DNA, 15 bp, synthetic construct
  source 1..15: mol_type = other DNA
ctttttacaaagcaa

SEQ ID NO: 7297 - DNA, 15 bp, synthetic construct
  source 1..15: mol_type = other DNA
gttaaaaacaaggat

SEQ ID NO: 7298 - DNA, 15 bp, synthetic construct
  source 1..15: mol_type = other DNA
tatgatggctcttca

SEQ ID NO: 7299 - DNA, 15 bp, synthetic construct
  source 1..15: mol_type = other DNA
tcgtttccactttat

SEQ ID NO: 7300 - DNA, 15 bp, synthetic construct
  source 1..15: mol_type = other DNA
aaaggtgaacatggt

SEQ ID NO: 7301 - DNA, 15 bp, synthetic construct
  source 1..15: mol_type = other DNA
tttaatttcaacact

SEQ ID NO: 7302 - DNA, 15 bp, synthetic construct
  source 1..15: mol_type = other DNA
gcttctgggagccaa

SEQ ID NO: 7303 - DNA, 15 bp, synthetic construct
  source 1..15: mol_type = other DNA
ggtgggtaatatagc

SEQ ID NO: 7304 - DNA, 15 bp, synthetic construct
  source 1..15: mol_type = other DNA
ccttttgtcaaaaat

SEQ ID NO: 7305 - DNA, 15 bp, synthetic construct
  source 1..15: mol_type = other DNA
agcataacctgagct

SEQ ID NO: 7306 - DNA, 15 bp, synthetic construct
  source 1..15: mol_type = other DNA
tgatttcttaagcgt

SEQ ID NO: 7307 - DNA, 15 bp, synthetic construct
  source 1..15: mol_type = other DNA
caggcaattttccga

SEQ ID NO: 7308 - DNA, 15 bp, synthetic construct
  source 1..15: mol_type = other DNA
tccctaactgaatga

SEQ ID NO: 7309 - DNA, 15 bp, synthetic construct
  source 1..15: mol_type = other DNA
cacagcattggaaaa

SEQ ID NO: 7310 - DNA, 15 bp, synthetic construct
  source 1..15: mol_type = other DNA
acttccagagtggga

SEQ ID NO: 7311 - DNA, 15 bp, synthetic construct
  source 1..15: mol_type = other DNA
actctcatcagagcc

SEQ ID NO: 7312 - DNA, 15 bp, synthetic construct
  source 1..15: mol_type = other DNA
gttgcctcaccttgt

SEQ ID NO: 7313 - DNA, 15 bp, synthetic construct
  source 1..15: mol_type = other DNA
ccaatggcagaaaaa

SEQ ID NO: 7314 - DNA, 15 bp, synthetic construct
  source 1..15: mol_type = other DNA
catgaaataacaagc

SEQ ID NO: 7315 - DNA, 15 bp, synthetic construct
  source 1..15: mol_type = other DNA
gacaaggtcatcatc

SEQ ID NO: 7316 - DNA, 15 bp, synthetic construct
  source 1..15: mol_type = other DNA
tatggtttgctgttg

SEQ ID NO: 7317 - DNA, 15 bp, synthetic construct
  source 1..15: mol_type = other DNA
tacaaatacatgtgt

SEQ ID NO: 7318 - DNA, 15 bp, synthetic construct
  source 1..15: mol_type = other DNA
tcaatggaacaaagc

SEQ ID NO: 7319 - DNA, 15 bp, synthetic construct
  source 1..15: mol_type = other DNA
tatcatcttgcatgc

SEQ ID NO: 7320 - DNA, 15 bp, synthetic construct
  source 1..15: mol_type = other DNA
tttactgttcactct

SEQ ID NO: 7321 - DNA, 15 bp, synthetic construct
  source 1..15: mol_type = other DNA
tagtgacaatgtctc

SEQ ID NO: 7322 - DNA, 15 bp, synthetic construct
  source 1..15: mol_type = other DNA
cttactttccctcag

SEQ ID NO: 7323 - DNA, 15 bp, synthetic construct
  source 1..15: mol_type = other DNA
gtttcagctttagag

SEQ ID NO: 7324 - DNA, 15 bp, synthetic construct
  source 1..15: mol_type = other DNA
gatcatcagaaaagt

SEQ ID NO: 7325 - DNA, 15 bp, synthetic construct
  source 1..15: mol_type = other DNA
gtctcttctcttccc

SEQ ID NO: 7326 - DNA, 15 bp, synthetic construct
  source 1..15: mol_type = other DNA
aacaaattgaggaac

SEQ ID NO: 7327 - DNA, 15 bp, synthetic construct
  source 1..15: mol_type = other DNA
agcatcaccattagg

SEQ ID NO: 7328 - DNA, 15 bp, synthetic construct
  source 1..15: mol_type = other DNA
aattccacattgtca

SEQ ID NO: 7329 - DNA, 15 bp, synthetic construct
  source 1..15: mol_type = other DNA
aacagaatggacaaa

SEQ ID NO: 7330 - DNA, 15 bp, synthetic construct
  source 1..15: mol_type = other DNA
cgcttagctgaaact

SEQ ID NO: 7331 - DNA, 15 bp, synthetic construct
  source 1..15: mol_type = other DNA
ctgcattttatgcgc

SEQ ID NO: 7332 - DNA, 15 bp, synthetic construct
  source 1..15: mol_type = other DNA
gtgtaggttgtgtgt

SEQ ID NO: 7333 - DNA, 15 bp, synthetic construct
  source 1..15: mol_type = other DNA
ttaatctgttcaaga

SEQ ID NO: 7334 - DNA, 15 bp, synthetic construct
  source 1..15: mol_type = other DNA
atacaatggcatgat

SEQ ID NO: 7335 - DNA, 15 bp, synthetic construct
  source 1..15: mol_type = other DNA
acttgtcccacttag

SEQ ID NO: 7336 - DNA, 15 bp, synthetic construct
  source 1..15: mol_type = other DNA
gggccatgatcgtga

SEQ ID NO: 7337 - DNA, 15 bp, synthetic construct
  source 1..15: mol_type = other DNA
tgggcaaagcaacga

SEQ ID NO: 7338 - DNA, 15 bp, synthetic construct
  source 1..15: mol_type = other DNA
agcgcgtgccttata

SEQ ID NO: 7339 - DNA, 15 bp, synthetic construct
  source 1..15: mol_type = other DNA
tcgtggcgtattccc

SEQ ID NO: 7340 - DNA, 15 bp, synthetic construct
  source 1..15: mol_type = other DNA
ctaggctttagcaga

SEQ ID NO: 7341 - DNA, 30 bp, synthetic construct
  source 1..30: mol_type = other DNA
gttcgccttctaccagggaataggtcgtca

SEQ ID NO: 7342 - DNA, 15 bp, synthetic construct
  source 1..15: mol_type = other DNA
atggtggtggtaagg

SEQ ID NO: 7343 - DNA, 15 bp, synthetic construct
  source 1..15: mol_type = other DNA
atggtggtggtaagg

SEQ ID NO: 7344 - DNA, 15 bp, synthetic construct
  source 1..15: mol_type = other DNA
ggcgcagagctcgtc

SEQ ID NO: 7345 - DNA, 15 bp, synthetic construct
  source 1..15: mol_type = other DNA
gaagtagccataggg

SEQ ID NO: 7346 - DNA, 15 bp, synthetic construct
  source 1..15: mol_type = other DNA
agtgccgcaacctga

SEQ ID NO: 7347 - DNA, 15 bp, synthetic construct
  source 1..15: mol_type = other DNA
ctcctggcgccaagg

SEQ ID NO: 7348 - DNA, 15 bp, synthetic construct
  source 1..15: mol_type = other DNA
gatcgagcccaccgt

SEQ ID NO: 7349 - DNA, 15 bp, synthetic construct
  source 1..15: mol_type = other DNA
ccttccatgttcttg

SEQ ID NO: 7350 - DNA, 15 bp, synthetic construct
  source 1..15: mol_type = other DNA
gcgcgctcttcactt

SEQ ID NO: 7351 - DNA, 15 bp, synthetic construct
  source 1..15: mol_type = other DNA
aatttgctatgcctt

SEQ ID NO: 7352 - DNA, 15 bp, synthetic construct
  source 1..15: mol_type = other DNA
ttatttgatctcttt

SEQ ID NO: 7353 - DNA, 15 bp, synthetic construct
  source 1..15: mol_type = other DNA
ttgtttctccctcta

SEQ ID NO: 7354 - DNA, 15 bp, synthetic construct
  source 1..15: mol_type = other DNA
cactgtaaaggattg

SEQ ID NO: 7355 - DNA, 15 bp, synthetic construct
  source 1..15: mol_type = other DNA
gttatgagatctttt

SEQ ID NO: 7356 - DNA, 15 bp, synthetic construct
  source 1..15: mol_type = other DNA
ctctaccaagtcagc

SEQ ID NO: 7357 - DNA, 15 bp, synthetic construct
  source 1..15: mol_type = other DNA
gtagtggatgagaac

SEQ ID NO: 7358 - DNA, 15 bp, synthetic construct
  source 1..15: mol_type = other DNA
aaatctgtcacttga

SEQ ID NO: 7359 - DNA, 15 bp, synthetic construct
  source 1..15: mol_type = other DNA
agacatacatgttgt

SEQ ID NO: 7360 - DNA, 15 bp, synthetic construct
  source 1..15: mol_type = other DNA
cacttgttggcagga

SEQ ID NO: 7361 - DNA, 15 bp, synthetic construct
  source 1..15: mol_type = other DNA
tacagttcccgtaca

SEQ ID NO: 7362 - DNA, 15 bp, synthetic construct
  source 1..15: mol_type = other DNA
cactgcactatattg

SEQ ID NO: 7363 - DNA, 15 bp, synthetic construct
  source 1..15: mol_type = other DNA
atatcactcaataag

SEQ ID NO: 7364 - DNA, 15 bp, synthetic construct
  source 1..15: mol_type = other DNA
actagtctttttcca

SEQ ID NO: 7365 - DNA, 15 bp, synthetic construct
  source 1..15: mol_type = other DNA
gatgcagataaaagg

SEQ ID NO: 7366 - DNA, 15 bp, synthetic construct
  source 1..15: mol_type = other DNA
catgaccaggcatgt

SEQ ID NO: 7367 - DNA, 15 bp, synthetic construct
  source 1..15: mol_type = other DNA
tttctgctttgttgt

SEQ ID NO: 7368 - DNA, 15 bp, synthetic construct
  source 1..15: mol_type = other DNA
gcttcttcatgaatc

SEQ ID NO: 7369 - DNA, 15 bp, synthetic construct
  source 1..15: mol_type = other DNA
gctttgtaggtggat

SEQ ID NO: 7370 - DNA, 15 bp, synthetic construct
  source 1..15: mol_type = other DNA
tgtatatcacatagc

SEQ ID NO: 7371 - DNA, 15 bp, synthetic construct
  source 1..15: mol_type = other DNA
tgttttcttagtgtc

SEQ ID NO: 7372 - DNA, 15 bp, synthetic construct
  source 1..15: mol_type = other DNA
cttgactaacatcct

SEQ ID NO: 7373 - DNA, 15 bp, synthetic construct
  source 1..15: mol_type = other DNA
actaactctactgaa

SEQ ID NO: 7374 - DNA, 15 bp, synthetic construct
  source 1..15: mol_type = other DNA
atgagataccttgtg

SEQ ID NO: 7375 - DNA, 15 bp, synthetic construct
  source 1..15: mol_type = other DNA
atgatggtcacttgc

SEQ ID NO: 7376 - DNA, 15 bp, synthetic construct
  source 1..15: mol_type = other DNA
aattaacaaatacac

SEQ ID NO: 7377 - DNA, 15 bp, synthetic construct
  source 1..15: mol_type = other DNA
tagcatcaagcttct

SEQ ID NO: 7378 - DNA, 15 bp, synthetic construct
  source 1..15: mol_type = other DNA
gttaggagaaaccac

SEQ ID NO: 7379 - DNA, 15 bp, synthetic construct
  source 1..15: mol_type = other DNA
gagagaagatgactt

SEQ ID NO: 7380 - DNA, 15 bp, synthetic construct
  source 1..15: mol_type = other DNA
atcctgcccaaggag

SEQ ID NO: 7381 - DNA, 15 bp, synthetic construct
  source 1..15: mol_type = other DNA
tgtaatattgacatc

SEQ ID NO: 7382 - DNA, 15 bp, synthetic construct
  source 1..15: mol_type = other DNA
tcactactcaaggct

SEQ ID NO: 7383 - DNA, 15 bp, synthetic construct
  source 1..15: mol_type = other DNA
gtttctacttgatag

SEQ ID NO: 7384 - DNA, 15 bp, synthetic construct
  source 1..15: mol_type = other DNA
aattctaatggtggt

SEQ ID NO: 7385 - DNA, 15 bp, synthetic construct
  source 1..15: mol_type = other DNA
gtgatattgcaaaaa

SEQ ID NO: 7386 - DNA, 15 bp, synthetic construct
  source 1..15: mol_type = other DNA
tcatgctgatgctaa

SEQ ID NO: 7387 - DNA, 15 bp, synthetic construct
  source 1..15: mol_type = other DNA
gcttattaaatttta

SEQ ID NO: 7388 - DNA, 15 bp, synthetic construct
  source 1..15: mol_type = other DNA
ctcataactccaaca

SEQ ID NO: 7389 - DNA, 15 bp, synthetic construct
  source 1..15: mol_type = other DNA
agtcatttaagtcat

SEQ ID NO: 7390 - DNA, 15 bp, synthetic construct
  source 1..15: mol_type = other DNA
aaagagttcattcat

SEQ ID NO: 7391 - DNA, 15 bp, synthetic construct
  source 1..15: mol_type = other DNA
ttgctgctcaaacta

SEQ ID NO: 7392 - DNA, 15 bp, synthetic construct
  source 1..15: mol_type = other DNA
gcatgttatttcaac

SEQ ID NO: 7393 - DNA, 15 bp, synthetic construct
  source 1..15: mol_type = other DNA
ttgccttctggttac

SEQ ID NO: 7394 - DNA, 15 bp, synthetic construct
  source 1..15: mol_type = other DNA
catcaccctttgcag

SEQ ID NO: 7395 - DNA, 15 bp, synthetic construct
  source 1..15: mol_type = other DNA
cagtgaaagtatttt

SEQ ID NO: 7396 - DNA, 15 bp, synthetic construct
  source 1..15: mol_type = other DNA
actccctgtttttca

SEQ ID NO: 7397 - DNA, 15 bp, synthetic construct
  source 1..15: mol_type = other DNA
cgatatcgcattcag

SEQ ID NO: 7398 - DNA, 15 bp, synthetic construct
  source 1..15: mol_type = other DNA
tgcatacagaatcct

SEQ ID NO: 7399 - DNA, 15 bp, synthetic construct
  source 1..15: mol_type = other DNA
ataccacattgtttt

SEQ ID NO: 7400 - DNA, 15 bp, synthetic construct
  source 1..15: mol_type = other DNA
tctttgaatcttgct

SEQ ID NO: 7401 - DNA, 15 bp, synthetic construct
  source 1..15: mol_type = other DNA
acggataaatggtga

SEQ ID NO: 7402 - DNA, 15 bp, synthetic construct
  source 1..15: mol_type = other DNA
ctggaaatgagtacc

SEQ ID NO: 7403 - DNA, 15 bp, synthetic construct
  source 1..15: mol_type = other DNA
taaccgaagtttgta

SEQ ID NO: 7404 - DNA, 15 bp, synthetic construct
  source 1..15: mol_type = other DNA
taatgctggctgttc

SEQ ID NO: 7405 - DNA, 15 bp, synthetic construct
  source 1..15: mol_type = other DNA
cataaacactcaata

SEQ ID NO: 7406 - DNA, 15 bp, synthetic construct
  source 1..15: mol_type = other DNA
ggataatctatcgca

SEQ ID NO: 7407 - DNA, 15 bp, synthetic construct
  source 1..15: mol_type = other DNA
acttgcctgtcgaag

SEQ ID NO: 7408 - DNA, 15 bp, synthetic construct
  source 1..15: mol_type = other DNA
aaatacaaccacagg

SEQ ID NO: 7409 - DNA, 15 bp, synthetic construct
  source 1..15: mol_type = other DNA
ctatgattgctgtgt

SEQ ID NO: 7410 - DNA, 15 bp, synthetic construct
  source 1..15: mol_type = other DNA
tgacaaaaactgacc

SEQ ID NO: 7411 - DNA, 15 bp, synthetic construct
  source 1..15: mol_type = other DNA
taccagagagcattc

SEQ ID NO: 7412 - DNA, 15 bp, synthetic construct
  source 1..15: mol_type = other DNA
gcttggcatgaggtt

SEQ ID NO: 7413 - DNA, 15 bp, synthetic construct
  source 1..15: mol_type = other DNA
tgaatttgaaccacc

SEQ ID NO: 7414 - DNA, 15 bp, synthetic construct
  source 1..15: mol_type = other DNA
tctcagaggaaccca

SEQ ID NO: 7415 - DNA, 15 bp, synthetic construct
  source 1..15: mol_type = other DNA
tggcaattggtgatt

SEQ ID NO: 7416 - DNA, 15 bp, synthetic construct
  source 1..15: mol_type = other DNA
aagtcttttaccttc

SEQ ID NO: 7417 - DNA, 15 bp, synthetic construct
  source 1..15: mol_type = other DNA
aactgctggagcgaa

SEQ ID NO: 7418 - DNA, 15 bp, synthetic construct
  source 1..15: mol_type = other DNA
agcttggttcttcta

SEQ ID NO: 7419 - DNA, 15 bp, synthetic construct
  source 1..15: mol_type = other DNA
caagtttttcatgtg

SEQ ID NO: 7420 - DNA, 15 bp, synthetic construct
  source 1..15: mol_type = other DNA
aatcactgatggtat

SEQ ID NO: 7421 - DNA, 15 bp, synthetic construct
  source 1..15: mol_type = other DNA
ttgagtcgacatctg

SEQ ID NO: 7422 - DNA, 15 bp, synthetic construct
  source 1..15: mol_type = other DNA
gtatgggccatacca

SEQ ID NO: 7423 - DNA, 15 bp, synthetic construct
  source 1..15: mol_type = other DNA
acgtaagcattactc

SEQ ID NO: 7424 - DNA, 15 bp, synthetic construct
  source 1..15: mol_type = other DNA
ttgtacactgttttg

SEQ ID NO: 7425 - DNA, 15 bp, synthetic construct
  source 1..15: mol_type = other DNA
tgatgtaaatcactc

SEQ ID NO: 7426 - DNA, 15 bp, synthetic construct
  source 1..15: mol_type = other DNA
ccaaaatgatactga

SEQ ID NO: 7427 - DNA, 15 bp, synthetic construct
  source 1..15: mol_type = other DNA
accctaagtgttttc

SEQ ID NO: 7428 - DNA, 15 bp, synthetic construct
  source 1..15: mol_type = other DNA
tggtgtcgtagattt

SEQ ID NO: 7429 - DNA, 15 bp, synthetic construct
  source 1..15: mol_type = other DNA
gggagaattaagtag

SEQ ID NO: 7430 - DNA, 15 bp, synthetic construct
  source 1..15: mol_type = other DNA
agtaagtaggctagt

SEQ ID NO: 7431 - DNA, 15 bp, synthetic construct
  source 1..15: mol_type = other DNA
ccaaaaatgtgtgtg

SEQ ID NO: 7432 - DNA, 15 bp, synthetic construct
  source 1..15: mol_type = other DNA
tgtgatgaataatgt

SEQ ID NO: 7433 - DNA, 15 bp, synthetic construct
  source 1..15: mol_type = other DNA
atacagcttttgatg

SEQ ID NO: 7434 - DNA, 15 bp, synthetic construct
  source 1..15: mol_type = other DNA
agagttaattggaaa

SEQ ID NO: 7435 - DNA, 15 bp, synthetic construct
  source 1..15: mol_type = other DNA
tgaactagcactgag

SEQ ID NO: 7436 - DNA, 15 bp, synthetic construct
  source 1..15: mol_type = other DNA
gaagtgactgagttt

SEQ ID NO: 7437 - DNA, 15 bp, synthetic construct
  source 1..15: mol_type = other DNA
cgctttttgcaggaa

SEQ ID NO: 7438 - DNA, 15 bp, synthetic construct
  source 1..15: mol_type = other DNA
aatccagcaaagtta

SEQ ID NO: 7439 - DNA, 15 bp, synthetic construct
  source 1..15: mol_type = other DNA
ggacaggtgttcagg

SEQ ID NO: 7440 - DNA, 15 bp, synthetic construct
  source 1..15: mol_type = other DNA
gggtctgatgttact

SEQ ID NO: 7441 - DNA, 15 bp, synthetic construct
  source 1..15: mol_type = other DNA
aatgcgaaatgacga

SEQ ID NO: 7442 - DNA, 15 bp, synthetic construct
  source 1..15: mol_type = other DNA
gttaacagtaccaca

SEQ ID NO: 7443 - DNA, 15 bp, synthetic construct
  source 1..15: mol_type = other DNA
tttcttggtttcatt

SEQ ID NO: 7444 - DNA, 15 bp, synthetic construct
  source 1..15: mol_type = other DNA
atcactgaagaggtc

SEQ ID NO: 7445 - DNA, 15 bp, synthetic construct
  source 1..15: mol_type = other DNA
tgaaattgagatgag

SEQ ID NO: 7446 - DNA, 15 bp, synthetic construct
  source 1..15: mol_type = other DNA
ggcctgtttagttag

SEQ ID NO: 7447 - DNA, 15 bp, synthetic construct
  source 1..15: mol_type = other DNA
tttgctttgttttta

SEQ ID NO: 7448 - DNA, 15 bp, synthetic construct
  source 1..15: mol_type = other DNA
ctatcaccagattca

SEQ ID NO: 7449 - DNA, 15 bp, synthetic construct
  source 1..15: mol_type = other DNA
tgaaagtccaaaacc

SEQ ID NO: 7450 - DNA, 15 bp, synthetic construct
  source 1..15: mol_type = other DNA
ggaactctcatttgg

SEQ ID NO: 7451 - DNA, 15 bp, synthetic construct
  source 1..15: mol_type = other DNA
ttcaatatcagtgtc

SEQ ID NO: 7452 - DNA, 15 bp, synthetic construct
  source 1..15: mol_type = other DNA
tacatacctgcattt

SEQ ID NO: 7453 - DNA, 15 bp, synthetic construct
  source 1..15: mol_type = other DNA
ctcttgaagcattga

SEQ ID NO: 7454 - DNA, 15 bp, synthetic construct
  source 1..15: mol_type = other DNA
cagagataagtaagg

SEQ ID NO: 7455 - DNA, 15 bp, synthetic construct
  source 1..15: mol_type = other DNA
cttgagcagtgaaac

SEQ ID NO: 7456 - DNA, 15 bp, synthetic construct
  source 1..15: mol_type = other DNA
cttcagcttcttcta

SEQ ID NO: 7457 - DNA, 15 bp, synthetic construct
  source 1..15: mol_type = other DNA
tgatgaagaacatgg

SEQ ID NO: 7458 - DNA, 15 bp, synthetic construct
  source 1..15: mol_type = other DNA
atgcaaactacaatt

SEQ ID NO: 7459 - DNA, 15 bp, synthetic construct
  source 1..15: mol_type = other DNA
tccatatcagtacac

SEQ ID NO: 7460 - DNA, 15 bp, synthetic construct
  source 1..15: mol_type = other DNA
ccgtactgcagacaa

SEQ ID NO: 7461 - DNA, 15 bp, synthetic construct
  source 1..15: mol_type = other DNA
cgaaggacctcagag

SEQ ID NO: 7462 - DNA, 15 bp, synthetic construct
  source 1..15: mol_type = other DNA
cctaaaggccaaaga

SEQ ID NO: 7463 - DNA, 15 bp, synthetic construct
  source 1..15: mol_type = other DNA
ttgcttgtgcttact

SEQ ID NO: 7464 - DNA, 15 bp, synthetic construct
  source 1..15: mol_type = other DNA
atgccacctgaatgc

SEQ ID NO: 7465 - DNA, 15 bp, synthetic construct
  source 1..15: mol_type = other DNA
gaggttttctctcaa

SEQ ID NO: 7466 - DNA, 15 bp, synthetic construct
  source 1..15: mol_type = other DNA
taattctcaccttgg

SEQ ID NO: 7467 - DNA, 15 bp, synthetic construct
  source 1..15: mol_type = other DNA
gaggttttctctcaa

SEQ ID NO: 7468 - DNA, 15 bp, synthetic construct
  source 1..15: mol_type = other DNA
taattctcaccttgg

SEQ ID NO: 7469 - DNA, 15 bp, synthetic construct
  source 1..15: mol_type = other DNA
gaaagatccctcagg

SEQ ID NO: 7470 - DNA, 15 bp, synthetic construct
  source 1..15: mol_type = other DNA
tatcaggaacttata

SEQ ID NO: 7471 - DNA, 15 bp, synthetic construct
  source 1..15: mol_type = other DNA
taagaattaattatt

SEQ ID NO: 7472 - DNA, 15 bp, synthetic construct
  source 1..15: mol_type = other DNA
ttccacagtgctcaa

SEQ ID NO: 7473 - DNA, 15 bp, synthetic construct
  source 1..15: mol_type = other DNA
ttatgtaggaaaagt

SEQ ID NO: 7474 - DNA, 15 bp, synthetic construct
  source 1..15: mol_type = other DNA
acaaatcaagatggc

SEQ ID NO: 7475 - DNA, 15 bp, synthetic construct
  source 1..15: mol_type = other DNA
tattaaggagtgctt

SEQ ID NO: 7476 - DNA, 15 bp, synthetic construct
  source 1..15: mol_type = other DNA
aacaagggcgaagtt

SEQ ID NO: 7477 - DNA, 15 bp, synthetic construct
  source 1..15: mol_type = other DNA
gttcttcacagtcat

SEQ ID NO: 7478 - DNA, 15 bp, synthetic construct
  source 1..15: mol_type = other DNA
tgtggcatttccatt

SEQ ID NO: 7479 - DNA, 15 bp, synthetic construct
  source 1..15: mol_type = other DNA
tgaacctgttttgca

SEQ ID NO: 7480 - DNA, 15 bp, synthetic construct
  source 1..15: mol_type = other DNA
attcctatgggaaac

SEQ ID NO: 7481 - DNA, 15 bp, synthetic construct
  source 1..15: mol_type = other DNA
acagaatcagcattt

SEQ ID NO: 7482 - DNA, 15 bp, synthetic construct
  source 1..15: mol_type = other DNA
tttgcatgaacacta

SEQ ID NO: 7483 - DNA, 15 bp, synthetic construct
  source 1..15: mol_type = other DNA
atgctgcttaatgct

SEQ ID NO: 7484 - DNA, 15 bp, synthetic construct
  source 1..15: mol_type = other DNA
atacttggtaacaca

SEQ ID NO: 7485 - DNA, 15 bp, synthetic construct
  source 1..15: mol_type = other DNA
tcagatagaaccagc

SEQ ID NO: 7486 - DNA, 15 bp, synthetic construct
  source 1..15: mol_type = other DNA
tctcactaaggctgt

SEQ ID NO: 7487 - DNA, 15 bp, synthetic construct
  source 1..15: mol_type = other DNA
gacctctttggttgt

SEQ ID NO: 7488 - DNA, 15 bp, synthetic construct
  source 1..15: mol_type = other DNA
ttcgtacttaaagca

SEQ ID NO: 7489 - DNA, 15 bp, synthetic construct
  source 1..15: mol_type = other DNA
gtcagtttaatctct

SEQ ID NO: 7490 - DNA, 15 bp, synthetic construct
  source 1..15: mol_type = other DNA
tatcattcagaacct

SEQ ID NO: 7491 - DNA, 15 bp, synthetic construct
  source 1..15: mol_type = other DNA
catgtccccgatagc

SEQ ID NO: 7492 - DNA, 15 bp, synthetic construct
  source 1..15: mol_type = other DNA
cccaggtgctaatca

SEQ ID NO: 7493 - DNA, 15 bp, synthetic construct
  source 1..15: mol_type = other DNA
gtcaatctgtacccc

SEQ ID NO: 7494 - DNA, 15 bp, synthetic construct
  source 1..15: mol_type = other DNA
gtatcaagatggaga

SEQ ID NO: 7495 - DNA, 15 bp, synthetic construct
  source 1..15: mol_type = other DNA
agattagagcacagc

SEQ ID NO: 7496 - DNA, 15 bp, synthetic construct
  source 1..15: mol_type = other DNA
acacatcaacatcta

SEQ ID NO: 7497 - DNA, 15 bp, synthetic construct
  source 1..15: mol_type = other DNA
tgccaagcttgacgg

SEQ ID NO: 7498 - DNA, 15 bp, synthetic construct
  source 1..15: mol_type = other DNA
aatggcatgcagaac

SEQ ID NO: 7499 - DNA, 15 bp, synthetic construct
  source 1..15: mol_type = other DNA
atctgcccaagcatc

SEQ ID NO: 7500 - DNA, 15 bp, synthetic construct
  source 1..15: mol_type = other DNA
caagcctcaaagctg

SEQ ID NO: 7501 - DNA, 15 bp, synthetic construct
  source 1..15: mol_type = other DNA
atttggcgctaccgg

SEQ ID NO: 7502 - DNA, 15 bp, synthetic construct
  source 1..15: mol_type = other DNA
gatgctccacaacag

SEQ ID NO: 7503 - DNA, 15 bp, synthetic construct
  source 1..15: mol_type = other DNA
gctgttcatggaagg

SEQ ID NO: 7504 - DNA, 15 bp, synthetic construct
  source 1..15: mol_type = other DNA
tggaacgaagtcagc

SEQ ID NO: 7505 - DNA, 15 bp, synthetic construct
  source 1..15: mol_type = other DNA
acgaccatgccgttg

SEQ ID NO: 7506 - DNA, 15 bp, synthetic construct
  source 1..15: mol_type = other DNA
ccggtgactttgacg

SEQ ID NO: 7507 - DNA, 15 bp, synthetic construct
  source 1..15: mol_type = other DNA
ggcaggtcggttttg

SEQ ID NO: 7508 - DNA, 15 bp, synthetic construct
  source 1..15: mol_type = other DNA
tgccaacctgaacga

SEQ ID NO: 7509 - DNA, 15 bp, synthetic construct
  source 1..15: mol_type = other DNA
tcgtccggcaggaaa

SEQ ID NO: 7510 - DNA, 15 bp, synthetic construct
  source 1..15: mol_type = other DNA
gcggacaggctccga

SEQ ID NO: 7511 - DNA, 15 bp, synthetic construct
  source 1..15: mol_type = other DNA
aggctgctgaagcgc

SEQ ID NO: 7512 - DNA, 15 bp, synthetic construct
  source 1..15: mol_type = other DNA
ccaacatggagagga

SEQ ID NO: 7513 - DNA, 15 bp, synthetic construct
  source 1..15: mol_type = other DNA
aggcgcgtcttcagg

SEQ ID NO: 7514 - DNA, 15 bp, synthetic construct
  source 1..15: mol_type = other DNA
tccagcgaggcgtca

SEQ ID NO: 7515 - DNA, 15 bp, synthetic construct
  source 1..15: mol_type = other DNA
gccacgctcacgttc

SEQ ID NO: 7516 - DNA, 15 bp, synthetic construct
  source 1..15: mol_type = other DNA
ctccctttctctgtc

SEQ ID NO: 7517 - DNA, 15 bp, synthetic construct
  source 1..15: mol_type = other DNA
agggcctgcatttaa

SEQ ID NO: 7518 - DNA, 15 bp, synthetic construct
  source 1..15: mol_type = other DNA
aatcatggactcaac

SEQ ID NO: 7519 - DNA, 15 bp, synthetic construct
  source 1..15: mol_type = other DNA
ttacgtgctccatcc

SEQ ID NO: 7520 - DNA, 15 bp, synthetic construct
  source 1..15: mol_type = other DNA
cctttccacttgacc

SEQ ID NO: 7521 - DNA, 15 bp, synthetic construct
  source 1..15: mol_type = other DNA
aacctggaaactctt

SEQ ID NO: 7522 - DNA, 15 bp, synthetic construct
  source 1..15: mol_type = other DNA
aaagcgggaagaatg

SEQ ID NO: 7523 - DNA, 15 bp, synthetic construct
  source 1..15: mol_type = other DNA
ccattggcttctctg

SEQ ID NO: 7524 - DNA, 15 bp, synthetic construct
  source 1..15: mol_type = other DNA
gttacacagacccaa

SEQ ID NO: 7525 - DNA, 15 bp, synthetic construct
  source 1..15: mol_type = other DNA
ttcacatgtttccgg

SEQ ID NO: 7526 - DNA, 15 bp, synthetic construct
  source 1..15: mol_type = other DNA
aacagtgttctaatg

SEQ ID NO: 7527 - DNA, 15 bp, synthetic construct
  source 1..15: mol_type = other DNA
tttccttatgcaagc

SEQ ID NO: 7528 - DNA, 15 bp, synthetic construct
  source 1..15: mol_type = other DNA
tgcagagtaatccag

SEQ ID NO: 7529 - DNA, 15 bp, synthetic construct
  source 1..15: mol_type = other DNA
tgcacagctcttatg

SEQ ID NO: 7530 - DNA, 15 bp, synthetic construct
  source 1..15: mol_type = other DNA
ttctctctctttttc

SEQ ID NO: 7531 - DNA, 15 bp, synthetic construct
  source 1..15: mol_type = other DNA
tcctgaataccatcc

SEQ ID NO: 7532 - DNA, 15 bp, synthetic construct
  source 1..15: mol_type = other DNA
cttgtcttccctcct

SEQ ID NO: 7533 - DNA, 15 bp, synthetic construct
  source 1..15: mol_type = other DNA
ccgtgaaaaagacac

SEQ ID NO: 7534 - DNA, 15 bp, synthetic construct
  source 1..15: mol_type = other DNA
tttttgtctctggct

SEQ ID NO: 7535 - DNA, 15 bp, synthetic construct
  source 1..15: mol_type = other DNA
tgctagtacagaggc

SEQ ID NO: 7536 - DNA, 15 bp, synthetic construct
  source 1..15: mol_type = other DNA
ttaggttcagccttt

SEQ ID NO: 7537 - DNA, 15 bp, synthetic construct
  source 1..15: mol_type = other DNA
tgtgttggaaaagtt

SEQ ID NO: 7538 - DNA, 15 bp, synthetic construct
  source 1..15: mol_type = other DNA
gcagatcttgtgtac

SEQ ID NO: 7539 - DNA, 15 bp, synthetic construct
  source 1..15: mol_type = other DNA
tgctgacattacatt

SEQ ID NO: 7540 - DNA, 15 bp, synthetic construct
  source 1..15: mol_type = other DNA
gcaccagattctcca

SEQ ID NO: 7541 - DNA, 15 bp, synthetic construct
  source 1..15: mol_type = other DNA
gataagtgaccatag

SEQ ID NO: 7542 - DNA, 15 bp, synthetic construct
  source 1..15: mol_type = other DNA
agcaataaatagctg

SEQ ID NO: 7543 - DNA, 15 bp, synthetic construct
  source 1..15: mol_type = other DNA
aagttgcctttgcca

SEQ ID NO: 7544 - DNA, 15 bp, synthetic construct
  source 1..15: mol_type = other DNA
aacttctagttgacc

SEQ ID NO: 7545 - DNA, 15 bp, synthetic construct
  source 1..15: mol_type = other DNA
accactgccaatgag

SEQ ID NO: 7546 - DNA, 15 bp, synthetic construct
  source 1..15: mol_type = other DNA
actatatccgctcct

SEQ ID NO: 7547 - DNA, 15 bp, synthetic construct
  source 1..15: mol_type = other DNA
ccatcctggacttac

SEQ ID NO: 7548 - DNA, 15 bp, synthetic construct
  source 1..15: mol_type = other DNA
cataccccttgtatc

SEQ ID NO: 7549 - DNA, 15 bp, synthetic construct
  source 1..15: mol_type = other DNA
caaaaagtcctgaga

SEQ ID NO: 7550 - DNA, 15 bp, synthetic construct
  source 1..15: mol_type = other DNA
ttgctttgtgaatcg

SEQ ID NO: 7551 - DNA, 15 bp, synthetic construct
  source 1..15: mol_type = other DNA
ataaagcgcgcacac

SEQ ID NO: 7552 - DNA, 15 bp, synthetic construct
  source 1..15: mol_type = other DNA
gtgaggaaccttcaa

SEQ ID NO: 7553 - DNA, 15 bp, synthetic construct
  source 1..15: mol_type = other DNA
tctctttcttgatca

SEQ ID NO: 7554 - DNA, 15 bp, synthetic construct
  source 1..15: mol_type = other DNA
cttttccgggagagg

SEQ ID NO: 7555 - DNA, 15 bp, synthetic construct
  source 1..15: mol_type = other DNA
aacgctcaattcaca

SEQ ID NO: 7556 - DNA, 15 bp, synthetic construct
  source 1..15: mol_type = other DNA
gcatttttggtcgaa

SEQ ID NO: 7557 - DNA, 15 bp, synthetic construct
  source 1..15: mol_type = other DNA
cagtttaggtctgcg

SEQ ID NO: 7558 - DNA, 15 bp, synthetic construct
  source 1..15: mol_type = other DNA
ggaaggtgccgggtt

SEQ ID NO: 7559 - DNA, 15 bp, synthetic construct
  source 1..15: mol_type = other DNA
gcggctcatctgctg

SEQ ID NO: 7560 - DNA, 15 bp, synthetic construct
  source 1..15: mol_type = other DNA
cgggctccgagctct

SEQ ID NO: 7561 - DNA, 15 bp, synthetic construct
  source 1..15: mol_type = other DNA
gcctcctcgagcctc

SEQ ID NO: 7562 - DNA, 15 bp, synthetic construct
  source 1..15: mol_type = other DNA
ccaggtctgccggaa

SEQ ID NO: 7563 - DNA, 15 bp, synthetic construct
  source 1..15: mol_type = other DNA
tgaaagctcctttgg

SEQ ID NO: 7564 - DNA, 15 bp, synthetic construct
  source 1..15: mol_type = other DNA
ccccggcgtagagag

SEQ ID NO: 7565 - DNA, 15 bp, synthetic construct
  source 1..15: mol_type = other DNA
gttcacagaaggaag

SEQ ID NO: 7566 - DNA, 15 bp, synthetic construct
  source 1..15: mol_type = other DNA
caacttgagtaaaac

SEQ ID NO: 7567 - DNA, 15 bp, synthetic construct
  source 1..15: mol_type = other DNA
agggcaaacctacag

SEQ ID NO: 7568 - DNA, 15 bp, synthetic construct
  source 1..15: mol_type = other DNA
ttgattatttcactg

SEQ ID NO: 7569 - DNA, 15 bp, synthetic construct
  source 1..15: mol_type = other DNA
tgctggtccatcttc

SEQ ID NO: 7570 - DNA, 15 bp, synthetic construct
  source 1..15: mol_type = other DNA
ttacgacttctccca

SEQ ID NO: 7571 - DNA, 15 bp, synthetic construct
  source 1..15: mol_type = other DNA
aggtactctttcctc

SEQ ID NO: 7572 - DNA, 15 bp, synthetic construct
  source 1..15: mol_type = other DNA
ccattcacagactac

SEQ ID NO: 7573 - DNA, 15 bp, synthetic construct
  source 1..15: mol_type = other DNA
cgacagagggtactg

SEQ ID NO: 7574 - DNA, 15 bp, synthetic construct
  source 1..15: mol_type = other DNA
agcctctttagaatg

SEQ ID NO: 7575 - DNA, 15 bp, synthetic construct
  source 1..15: mol_type = other DNA
tctcagaatcacaaa

SEQ ID NO: 7576 - DNA, 15 bp, synthetic construct
  source 1..15: mol_type = other DNA
atcaacactaacctg

SEQ ID NO: 7577 - DNA, 15 bp, synthetic construct
  source 1..15: mol_type = other DNA
agtttttgcaaaagt

SEQ ID NO: 7578 - DNA, 15 bp, synthetic construct
  source 1..15: mol_type = other DNA
ggccagtctatcatc

SEQ ID NO: 7579 - DNA, 15 bp, synthetic construct
  source 1..15: mol_type = other DNA
cctgcatccttgatg

SEQ ID NO: 7580 - DNA, 15 bp, synthetic construct
  source 1..15: mol_type = other DNA
gaaggaaggaattct

SEQ ID NO: 7581 - DNA, 15 bp, synthetic construct
  source 1..15: mol_type = other DNA
acttgtccggtatct

SEQ ID NO: 7582 - DNA, 15 bp, synthetic construct
  source 1..15: mol_type = other DNA
cgcaacctacaccaa

SEQ ID NO: 7583 - DNA, 15 bp, synthetic construct
  source 1..15: mol_type = other DNA
atgacaaagccgaag

SEQ ID NO: 7584 - DNA, 15 bp, synthetic construct
  source 1..15: mol_type = other DNA
gacccttgtaaggta

SEQ ID NO: 7585 - DNA, 15 bp, synthetic construct
  source 1..15: mol_type = other DNA
aaccctcgattcctg

SEQ ID NO: 7586 - DNA, 15 bp, synthetic construct
  source 1..15: mol_type = other DNA
cctttccttctcact

SEQ ID NO: 7587 - DNA, 15 bp, synthetic construct
  source 1..15: mol_type = other DNA
ctcatacaatacagc

SEQ ID NO: 7588 - DNA, 15 bp, synthetic construct
  source 1..15: mol_type = other DNA
gcactctcattaatc

SEQ ID NO: 7589 - DNA, 15 bp, synthetic construct
  source 1..15: mol_type = other DNA
gttttgttcacagaa

SEQ ID NO: 7590 - DNA, 15 bp, synthetic construct
  source 1..15: mol_type = other DNA
agcagggtaaatttg

SEQ ID NO: 7591 - DNA, 15 bp, synthetic construct
  source 1..15: mol_type = other DNA
tgtttcatgtggctt

SEQ ID NO: 7592 - DNA, 15 bp, synthetic construct
  source 1..15: mol_type = other DNA
gtcagtcattttctc

SEQ ID NO: 7593 - DNA, 15 bp, synthetic construct
  source 1..15: mol_type = other DNA
acaagacaaaaggac

SEQ ID NO: 7594 - DNA, 15 bp, synthetic construct
  source 1..15: mol_type = other DNA
tatcgtgccacccat

SEQ ID NO: 7595 - DNA, 15 bp, synthetic construct
  source 1..15: mol_type = other DNA
ttattgctgagccag

SEQ ID NO: 7596 - DNA, 15 bp, synthetic construct
  source 1..15: mol_type = other DNA
ttgccgacagtccta

SEQ ID NO: 7597 - DNA, 15 bp, synthetic construct
  source 1..15: mol_type = other DNA
gtcaagtatttgttt

SEQ ID NO: 7598 - DNA, 15 bp, synthetic construct
  source 1..15: mol_type = other DNA
acatttctcggacct

SEQ ID NO: 7599 - DNA, 15 bp, synthetic construct
  source 1..15: mol_type = other DNA
gccgatctgttatat

SEQ ID NO: 7600 - DNA, 15 bp, synthetic construct
  source 1..15: mol_type = other DNA
atgttgtcaaacttt

SEQ ID NO: 7601 - DNA, 15 bp, synthetic construct
  source 1..15: mol_type = other DNA
gtcttcaggatcaaa

SEQ ID NO: 7602 - DNA, 15 bp, synthetic construct
  source 1..15: mol_type = other DNA
ctaagaaacaacacc

SEQ ID NO: 7603 - DNA, 15 bp, synthetic construct
  source 1..15: mol_type = other DNA
tctaaaccatgaagg

SEQ ID NO: 7604 - DNA, 15 bp, synthetic construct
  source 1..15: mol_type = other DNA
aacatgcctttttct

SEQ ID NO: 7605 - DNA, 15 bp, synthetic construct
  source 1..15: mol_type = other DNA
cctttgaaacatcac

SEQ ID NO: 7606 - DNA, 15 bp, synthetic construct
  source 1..15: mol_type = other DNA
gtggcccttaatcac

SEQ ID NO: 7607 - DNA, 15 bp, synthetic construct
  source 1..15: mol_type = other DNA
tgctcaataaataaa

SEQ ID NO: 7608 - DNA, 15 bp, synthetic construct
  source 1..15: mol_type = other DNA
tgctttgttccactt

SEQ ID NO: 7609 - DNA, 15 bp, synthetic construct
  source 1..15: mol_type = other DNA
tcttcaggtgagact

SEQ ID NO: 7610 - DNA, 15 bp, synthetic construct
  source 1..15: mol_type = other DNA
ttgttggactaaccc

SEQ ID NO: 7611 - DNA, 15 bp, synthetic construct
  source 1..15: mol_type = other DNA
cactgttgaaagaaa

SEQ ID NO: 7612 - DNA, 15 bp, synthetic construct
  source 1..15: mol_type = other DNA
gttctcttatagaat

SEQ ID NO: 7613 - DNA, 15 bp, synthetic construct
  source 1..15: mol_type = other DNA
gaaatgtgtgaaact

SEQ ID NO: 7614 - DNA, 15 bp, synthetic construct
  source 1..15: mol_type = other DNA
taaccacgtgctctt

SEQ ID NO: 7615 - DNA, 15 bp, synthetic construct
  source 1..15: mol_type = other DNA
cagatgtaagaaata

SEQ ID NO: 7616 - DNA, 15 bp, synthetic construct
  source 1..15: mol_type = other DNA
gaataaatcagtgag

SEQ ID NO: 7617 - DNA, 15 bp, synthetic construct
  source 1..15: mol_type = other DNA
gttactactactcca

SEQ ID NO: 7618 - DNA, 15 bp, synthetic construct
  source 1..15: mol_type = other DNA
tttggtattgtttgc

SEQ ID NO: 7619 - DNA, 15 bp, synthetic construct
  source 1..15: mol_type = other DNA
tggtgctggttctgc

SEQ ID NO: 7620 - DNA, 15 bp, synthetic construct
  source 1..15: mol_type = other DNA
taaagtccaacgcaa

SEQ ID NO: 7621 - DNA, 15 bp, synthetic construct
  source 1..15: mol_type = other DNA
ttccatcgaatgaga

SEQ ID NO: 7622 - DNA, 15 bp, synthetic construct
  source 1..15: mol_type = other DNA
aatcacttagcgtct

SEQ ID NO: 7623 - DNA, 15 bp, synthetic construct
  source 1..15: mol_type = other DNA
ttcatcataaaccat

SEQ ID NO: 7624 - DNA, 15 bp, synthetic construct
  source 1..15: mol_type = other DNA
ggttctgtggaccat

SEQ ID NO: 7625 - DNA, 15 bp, synthetic construct
  source 1..15: mol_type = other DNA
tgtcacgaatgattt

SEQ ID NO: 7626 - DNA, 15 bp, synthetic construct
  source 1..15: mol_type = other DNA
tgtggcagtaaatgt

SEQ ID NO: 7627 - DNA, 15 bp, synthetic construct
  source 1..15: mol_type = other DNA
catcatcgcgcaaca

SEQ ID NO: 7628 - DNA, 15 bp, synthetic construct
  source 1..15: mol_type = other DNA
gagcggcagcaaatt

SEQ ID NO: 7629 - DNA, 15 bp, synthetic construct
  source 1..15: mol_type = other DNA
agtgtttgatcacgg

SEQ ID NO: 7630 - DNA, 15 bp, synthetic construct
  source 1..15: mol_type = other DNA
cttgaaaaagaaaag

SEQ ID NO: 7631 - DNA, 15 bp, synthetic construct
  source 1..15: mol_type = other DNA
ctcatggactttgct

SEQ ID NO: 7632 - DNA, 15 bp, synthetic construct
  source 1..15: mol_type = other DNA
ccatccaaagaagag

SEQ ID NO: 7633 - DNA, 15 bp, synthetic construct
  source 1..15: mol_type = other DNA
tcctgtattacagaa

SEQ ID NO: 7634 - DNA, 15 bp, synthetic construct
  source 1..15: mol_type = other DNA
ttaaaatgtcaccct

SEQ ID NO: 7635 - DNA, 15 bp, synthetic construct
  source 1..15: mol_type = other DNA
gggttggcatacttc

SEQ ID NO: 7636 - DNA, 15 bp, synthetic construct
  source 1..15: mol_type = other DNA
cttggaggtagtgga

SEQ ID NO: 7637 - DNA, 15 bp, synthetic construct
  source 1..15: mol_type = other DNA
atcgtccttgttaaa

SEQ ID NO: 7638 - DNA, 15 bp, synthetic construct
  source 1..15: mol_type = other DNA
tagtggaaagggtga

SEQ ID NO: 7639 - DNA, 15 bp, synthetic construct
  source 1..15: mol_type = other DNA
tcatttttcagcatc

SEQ ID NO: 7640 - DNA, 15 bp, synthetic construct
  source 1..15: mol_type = other DNA
cattaatgttcctgt

SEQ ID NO: 7641 - DNA, 15 bp, synthetic construct
  source 1..15: mol_type = other DNA
gagtaacccagaaca

SEQ ID NO: 7642 - DNA, 15 bp, synthetic construct
  source 1..15: mol_type = other DNA
tttctttcaggcgtt

SEQ ID NO: 7643 - DNA, 15 bp, synthetic construct
  source 1..15: mol_type = other DNA
tgtcgaacatcttgt

SEQ ID NO: 7644 - DNA, 15 bp, synthetic construct
  source 1..15: mol_type = other DNA
tagatcttagctact

SEQ ID NO: 7645 - DNA, 15 bp, synthetic construct
  source 1..15: mol_type = other DNA
aatagttaatcaggt

SEQ ID NO: 7646 - DNA, 15 bp, synthetic construct
  source 1..15: mol_type = other DNA
cagtgaaagttttgt

SEQ ID NO: 7647 - DNA, 15 bp, synthetic construct
  source 1..15: mol_type = other DNA
accttagctcacata

SEQ ID NO: 7648 - DNA, 15 bp, synthetic construct
  source 1..15: mol_type = other DNA
tgtttgcatattggt

SEQ ID NO: 7649 - DNA, 15 bp, synthetic construct
  source 1..15: mol_type = other DNA
tccacaacatacctg

SEQ ID NO: 7650 - DNA, 15 bp, synthetic construct
  source 1..15: mol_type = other DNA
catagattctagttt

SEQ ID NO: 7651 - DNA, 15 bp, synthetic construct
  source 1..15: mol_type = other DNA
gtttaacagatggac

SEQ ID NO: 7652 - DNA, 15 bp, synthetic construct
  source 1..15: mol_type = other DNA
tccactaatgtacca

SEQ ID NO: 7653 - DNA, 15 bp, synthetic construct
  source 1..15: mol_type = other DNA
caataaacaagacgt

SEQ ID NO: 7654 - DNA, 15 bp, synthetic construct
  source 1..15: mol_type = other DNA
aaaagaattatctga

SEQ ID NO: 7655 - DNA, 15 bp, synthetic construct
  source 1..15: mol_type = other DNA
atgaaacagtgaaca

SEQ ID NO: 7656 - DNA, 15 bp, synthetic construct
  source 1..15: mol_type = other DNA
tttcgagggcatgct

SEQ ID NO: 7657 - DNA, 15 bp, synthetic construct
  source 1..15: mol_type = other DNA
cagaaccaggccttg

SEQ ID NO: 7658 - DNA, 15 bp, synthetic construct
  source 1..15: mol_type = other DNA
tagatgacctgcagt

SEQ ID NO: 7659 - DNA, 15 bp, synthetic construct
  source 1..15: mol_type = other DNA
ttgttctatattgtt

SEQ ID NO: 7660 - DNA, 15 bp, synthetic construct
  source 1..15: mol_type = other DNA
gtcatggttgtatga

SEQ ID NO: 7661 - DNA, 15 bp, synthetic construct
  source 1..15: mol_type = other DNA
cctagggataaagtt

SEQ ID NO: 7662 - DNA, 15 bp, synthetic construct
  source 1..15: mol_type = other DNA
gttggtcgaaattct

SEQ ID NO: 7663 - DNA, 15 bp, synthetic construct
  source 1..15: mol_type = other DNA
agcataatgagagag

SEQ ID NO: 7664 - DNA, 15 bp, synthetic construct
  source 1..15: mol_type = other DNA
atgattcctgacaat

SEQ ID NO: 7665 - DNA, 15 bp, synthetic construct
  source 1..15: mol_type = other DNA
gaaagcctcaccaca

SEQ ID NO: 7666 - DNA, 15 bp, synthetic construct
  source 1..15: mol_type = other DNA
aaggattcagatgat

SEQ ID NO: 7667 - DNA, 15 bp, synthetic construct
  source 1..15: mol_type = other DNA
ccgtaagttttagag

SEQ ID NO: 7668 - DNA, 15 bp, synthetic construct
  source 1..15: mol_type = other DNA
atgctcccgtgtagg

SEQ ID NO: 7669 - DNA, 15 bp, synthetic construct
  source 1..15: mol_type = other DNA
tccttacctttcaac

SEQ ID NO: 7670 - DNA, 15 bp, synthetic construct
  source 1..15: mol_type = other DNA
cctaacagcaatagt

SEQ ID NO: 7671 - DNA, 15 bp, synthetic construct
  source 1..15: mol_type = other DNA
acctgatgtctgtgg

SEQ ID NO: 7672 - DNA, 15 bp, synthetic construct
  source 1..15: mol_type = other DNA
tgctctatttagaat

SEQ ID NO: 7673 - DNA, 15 bp, synthetic construct
  source 1..15: mol_type = other DNA
gttttaagcattgtt

SEQ ID NO: 7674 - DNA, 15 bp, synthetic construct
  source 1..15: mol_type = other DNA
tagggctaggaaaaa

SEQ ID NO: 7675 - DNA, 15 bp, synthetic construct
  source 1..15: mol_type = other DNA
tgtggttaactaggg

SEQ ID NO: 7676 - DNA, 15 bp, synthetic construct
  source 1..15: mol_type = other DNA
gtgtggtttattttt

SEQ ID NO: 7677 - DNA, 15 bp, synthetic construct
  source 1..15: mol_type = other DNA
ctctactgaaatgca

SEQ ID NO: 7678 - DNA, 15 bp, synthetic construct
  source 1..15: mol_type = other DNA
gtgcttagtgtatgt

SEQ ID NO: 7679 - DNA, 15 bp, synthetic construct
  source 1..15: mol_type = other DNA
aatgttaaacgactt

SEQ ID NO: 7680 - DNA, 15 bp, synthetic construct
  source 1..15: mol_type = other DNA
cagaccctccttaaa

SEQ ID NO: 7681 - DNA, 15 bp, synthetic construct
  source 1..15: mol_type = other DNA
gatgaaggcatgtat

SEQ ID NO: 7682 - DNA, 15 bp, synthetic construct
  source 1..15: mol_type = other DNA
gttcagtggctccga

SEQ ID NO: 7683 - DNA, 15 bp, synthetic construct
  source 1..15: mol_type = other DNA
aactactcatgcagt

SEQ ID NO: 7684 - DNA, 15 bp, synthetic construct
  source 1..15: mol_type = other DNA
agatggaaccctaag

SEQ ID NO: 7685 - DNA, 15 bp, synthetic construct
  source 1..15: mol_type = other DNA
caaggtttgaaggag

SEQ ID NO: 7686 - DNA, 15 bp, synthetic construct
  source 1..15: mol_type = other DNA
gttcagtaagaagaa

SEQ ID NO: 7687 - DNA, 15 bp, synthetic construct
  source 1..15: mol_type = other DNA
ctggagacttgtacc

SEQ ID NO: 7688 - DNA, 15 bp, synthetic construct
  source 1..15: mol_type = other DNA
agaaagatgttgaaa

SEQ ID NO: 7689 - DNA, 15 bp, synthetic construct
  source 1..15: mol_type = other DNA
tctaatagcaactgg

SEQ ID NO: 7690 - DNA, 15 bp, synthetic construct
  source 1..15: mol_type = other DNA
tgagagttaattcaa

SEQ ID NO: 7691 - DNA, 15 bp, synthetic construct
  source 1..15: mol_type = other DNA
aggcttcacctcttc

SEQ ID NO: 7692 - DNA, 15 bp, synthetic construct
  source 1..15: mol_type = other DNA
ttccttcactttata

SEQ ID NO: 7693 - DNA, 15 bp, synthetic construct
  source 1..15: mol_type = other DNA
aatagcccacatact

SEQ ID NO: 7694 - DNA, 15 bp, synthetic construct
  source 1..15: mol_type = other DNA
tggatgtgattactg

SEQ ID NO: 7695 - DNA, 15 bp, synthetic construct
  source 1..15: mol_type = other DNA
ctagttcattagggt

SEQ ID NO: 7696 - DNA, 15 bp, synthetic construct
  source 1..15: mol_type = other DNA
tcatttctaaccata

SEQ ID NO: 7697 - DNA, 15 bp, synthetic construct
  source 1..15: mol_type = other DNA
actcacctgacgata

SEQ ID NO: 7698 - DNA, 15 bp, synthetic construct
  source 1..15: mol_type = other DNA
ctctgatctataaag

SEQ ID NO: 7699 - DNA, 15 bp, synthetic construct
  source 1..15: mol_type = other DNA
tctggtgttctcagg

SEQ ID NO: 7700 - DNA, 15 bp, synthetic construct
  source 1..15: mol_type = other DNA
tccccctgaaattaa

SEQ ID NO: 7701 - DNA, 15 bp, synthetic construct
  source 1..15: mol_type = other DNA
tacaaggtttgaagg

SEQ ID NO: 7702 - DNA, 15 bp, synthetic construct
  source 1..15: mol_type = other DNA
attcagcaagaagaa

SEQ ID NO: 7703 - DNA, 15 bp, synthetic construct
  source 1..15: mol_type = other DNA
gactgtcctgtagat

SEQ ID NO: 7704 - DNA, 15 bp, synthetic construct
  source 1..15: mol_type = other DNA
attccaagctatgct

SEQ ID NO: 7705 - DNA, 15 bp, synthetic construct
  source 1..15: mol_type = other DNA
catcccattgatctc

SEQ ID NO: 7706 - DNA, 15 bp, synthetic construct
  source 1..15: mol_type = other DNA
tgtttcgttctttcc

SEQ ID NO: 7707 - DNA, 15 bp, synthetic construct
  source 1..15: mol_type = other DNA
ctctggttacctttg

SEQ ID NO: 7708 - DNA, 15 bp, synthetic construct
  source 1..15: mol_type = other DNA
gaccacgcttgtgat

SEQ ID NO: 7709 - DNA, 15 bp, synthetic construct
  source 1..15: mol_type = other DNA
atattttaagtggat

SEQ ID NO: 7710 - DNA, 15 bp, synthetic construct
  source 1..15: mol_type = other DNA
ttaagatttgatttt

SEQ ID NO: 7711 - DNA, 15 bp, synthetic construct
  source 1..15: mol_type = other DNA
tggattgttgagaga

SEQ ID NO: 7712 - DNA, 15 bp, synthetic construct
  source 1..15: mol_type = other DNA
tgtgggtttcctgtt

SEQ ID NO: 7713 - DNA, 15 bp, synthetic construct
  source 1..15: mol_type = other DNA
actttcagatctact

SEQ ID NO: 7714 - DNA, 15 bp, synthetic construct
  source 1..15: mol_type = other DNA
tgtcttcctatgatg

SEQ ID NO: 7715 - DNA, 15 bp, synthetic construct
  source 1..15: mol_type = other DNA
ttactctttcaaggt

SEQ ID NO: 7716 - DNA, 15 bp, synthetic construct
  source 1..15: mol_type = other DNA
gccatgtccttctgg

SEQ ID NO: 7717 - DNA, 15 bp, synthetic construct
  source 1..15: mol_type = other DNA
taaaatctattaaat

SEQ ID NO: 7718 - DNA, 15 bp, synthetic construct
  source 1..15: mol_type = other DNA
aagatctgtaggtgt

SEQ ID NO: 7719 - DNA, 15 bp, synthetic construct
  source 1..15: mol_type = other DNA
tatttgcctaagtga

SEQ ID NO: 7720 - DNA, 15 bp, synthetic construct
  source 1..15: mol_type = other DNA
aaaactgtacttggc

SEQ ID NO: 7721 - DNA, 15 bp, synthetic construct
  source 1..15: mol_type = other DNA
ccaaacattatcttt

SEQ ID NO: 7722 - DNA, 15 bp, synthetic construct
  source 1..15: mol_type = other DNA
tctaaaagtcttagc

SEQ ID NO: 7723 - DNA, 15 bp, synthetic construct
  source 1..15: mol_type = other DNA
gtaatcagtccttcc

SEQ ID NO: 7724 - DNA, 15 bp, synthetic construct
  source 1..15: mol_type = other DNA
aggatttcttgtgga

SEQ ID NO: 7725 - DNA, 15 bp, synthetic construct
  source 1..15: mol_type = other DNA
tcagcctttgaagtc

SEQ ID NO: 7726 - DNA, 15 bp, synthetic construct
  source 1..15: mol_type = other DNA
cctgaccttttattc

SEQ ID NO: 7727 - DNA, 15 bp, synthetic construct
  source 1..15: mol_type = other DNA
atcaaaggtccttca

SEQ ID NO: 7728 - DNA, 15 bp, synthetic construct
  source 1..15: mol_type = other DNA
taaaccagctgggaa

SEQ ID NO: 7729 - DNA, 15 bp, synthetic construct
  source 1..15: mol_type = other DNA
actttaaagccttct

SEQ ID NO: 7730 - DNA, 15 bp, synthetic construct
  source 1..15: mol_type = other DNA
attctgaagagacac

SEQ ID NO: 7731 - DNA, 15 bp, synthetic construct
  source 1..15: mol_type = other DNA
gaaaatatgaatcag

SEQ ID NO: 7732 - DNA, 15 bp, synthetic construct
  source 1..15: mol_type = other DNA
cttaatgtcagtgga

SEQ ID NO: 7733 - DNA, 15 bp, synthetic construct
  source 1..15: mol_type = other DNA
aagtcccagtccctg

SEQ ID NO: 7734 - DNA, 15 bp, synthetic construct
  source 1..15: mol_type = other DNA
gttccctcgtctttt

SEQ ID NO: 7735 - DNA, 15 bp, synthetic construct
  source 1..15: mol_type = other DNA
acatacaaagaatca

SEQ ID NO: 7736 - DNA, 15 bp, synthetic construct
  source 1..15: mol_type = other DNA
gtcacttgacaacta

SEQ ID NO: 7737 - DNA, 15 bp, synthetic construct
  source 1..15: mol_type = other DNA
ggaacacaattgtta

SEQ ID NO: 7738 - DNA, 15 bp, synthetic construct
  source 1..15: mol_type = other DNA
gaatcccctaagaac

SEQ ID NO: 7739 - DNA, 15 bp, synthetic construct
  source 1..15: mol_type = other DNA
cccttaatcagcctg

SEQ ID NO: 7740 - DNA, 15 bp, synthetic construct
  source 1..15: mol_type = other DNA
cccttaatcagcctg

SEQ ID NO: 7741 - DNA, 15 bp, synthetic construct
  source 1..15: mol_type = other DNA
gccgagaaagacatc

SEQ ID NO: 7742 - DNA, 15 bp, synthetic construct
  source 1..15: mol_type = other DNA
ctttaccttatcgtt

SEQ ID NO: 7743 - DNA, 15 bp, synthetic construct
  source 1..15: mol_type = other DNA
cgctcctcaaaacgg

SEQ ID NO: 7744 - DNA, 15 bp, synthetic construct
  source 1..15: mol_type = other DNA
accccgaacgtggtc

SEQ ID NO: 7745 - DNA, 15 bp, synthetic construct
  source 1..15: mol_type = other DNA
gaatgggaataatcc

SEQ ID NO: 7746 - DNA, 15 bp, synthetic construct
  source 1..15: mol_type = other DNA
gctcagctcaatcgt

SEQ ID NO: 7747 - DNA, 15 bp, synthetic construct
  source 1..15: mol_type = other DNA
ctgtgggtgtaacta

SEQ ID NO: 7748 - DNA, 15 bp, synthetic construct
  source 1..15: mol_type = other DNA
aacaatgagatgaag

SEQ ID NO: 7749 - DNA, 15 bp, synthetic construct
  source 1..15: mol_type = other DNA
ggcataaagtgggaa

SEQ ID NO: 7750 - DNA, 15 bp, synthetic construct
  source 1..15: mol_type = other DNA
tcatcaggacctcat

SEQ ID NO: 7751 - DNA, 15 bp, synthetic construct
  source 1..15: mol_type = other DNA
agtgtgctattttca

SEQ ID NO: 7752 - DNA, 15 bp, synthetic construct
  source 1..15: mol_type = other DNA
tttcagttaaatgtc

SEQ ID NO: 7753 - DNA, 15 bp, synthetic construct
  source 1..15: mol_type = other DNA
cctaaacacatacgt

SEQ ID NO: 7754 - DNA, 15 bp, synthetic construct
  source 1..15: mol_type = other DNA
ctgaaatcccaagaa

SEQ ID NO: 7755 - DNA, 15 bp, synthetic construct
  source 1..15: mol_type = other DNA
ctattattatgaaga

SEQ ID NO: 7756 - DNA, 15 bp, synthetic construct
  source 1..15: mol_type = other DNA
attgaacccttgcct

SEQ ID NO: 7757 - DNA, 15 bp, synthetic construct
  source 1..15: mol_type = other DNA
acacgctttacagat

SEQ ID NO: 7758 - DNA, 15 bp, synthetic construct
  source 1..15: mol_type = other DNA
ggtatcagctacata

SEQ ID NO: 7759 - DNA, 15 bp, synthetic construct
  source 1..15: mol_type = other DNA
tcttaggatcacttg

SEQ ID NO: 7760 - DNA, 15 bp, synthetic construct
  source 1..15: mol_type = other DNA
aactgtcactctttc

SEQ ID NO: 7761 - DNA, 15 bp, synthetic construct
  source 1..15: mol_type = other DNA
gcaaagaagacactc

SEQ ID NO: 7762 - DNA, 15 bp, synthetic construct
  source 1..15: mol_type = other DNA
aatgttatccccaca

SEQ ID NO: 7763 - DNA, 15 bp, synthetic construct
  source 1..15: mol_type = other DNA
tatctggtgatcggt

SEQ ID NO: 7764 - DNA, 15 bp, synthetic construct
  source 1..15: mol_type = other DNA
ataacaaaattacct

SEQ ID NO: 7765 - DNA, 15 bp, synthetic construct
  source 1..15: mol_type = other DNA
tgacttttcctccat

SEQ ID NO: 7766 - DNA, 15 bp, synthetic construct
  source 1..15: mol_type = other DNA
cttaccttcattggc

SEQ ID NO: 7767 - DNA, 15 bp, synthetic construct
  source 1..15: mol_type = other DNA
ataatctcatcacag

SEQ ID NO: 7768 - DNA, 15 bp, synthetic construct
  source 1..15: mol_type = other DNA
tcttgtagagactca

SEQ ID NO: 7769 - DNA, 15 bp, synthetic construct
  source 1..15: mol_type = other DNA
tcacctaaagtggaa

SEQ ID NO: 7770 - DNA, 15 bp, synthetic construct
  source 1..15: mol_type = other DNA
aaaagcattaagtgt

SEQ ID NO: 7771 - DNA, 15 bp, synthetic construct
  source 1..15: mol_type = other DNA
tcacatgagtatgca

SEQ ID NO: 7772 - DNA, 15 bp, synthetic construct
  source 1..15: mol_type = other DNA
tatatagctcgccaa

SEQ ID NO: 7773 - DNA, 15 bp, synthetic construct
  source 1..15: mol_type = other DNA
tcacatgagtatgca

SEQ ID NO: 7774 - DNA, 15 bp, synthetic construct
  source 1..15: mol_type = other DNA
tatatagctcgccaa

SEQ ID NO: 7775 - DNA, 15 bp, synthetic construct
  source 1..15: mol_type = other DNA
atttccctacagtct

SEQ ID NO: 7776 - DNA, 15 bp, synthetic construct
  source 1..15: mol_type = other DNA
actctctatcacagt

SEQ ID NO: 7777 - DNA, 15 bp, synthetic construct
  source 1..15: mol_type = other DNA
agtcagagcactact

SEQ ID NO: 7778 - DNA, 15 bp, synthetic construct
  source 1..15: mol_type = other DNA
actactaccattgac

SEQ ID NO: 7779 - DNA, 15 bp, synthetic construct
  source 1..15: mol_type = other DNA
tcaggttgtcttgtc

SEQ ID NO: 7780 - DNA, 15 bp, synthetic construct
  source 1..15: mol_type = other DNA
aacctagttcaaaca

SEQ ID NO: 7781 - DNA, 15 bp, synthetic construct
  source 1..15: mol_type = other DNA
gcaaatgcttagatg

SEQ ID NO: 7782 - DNA, 15 bp, synthetic construct
  source 1..15: mol_type = other DNA
ggtactggacactat

SEQ ID NO: 7783 - DNA, 15 bp, synthetic construct
  source 1..15: mol_type = other DNA
ttcagggagcaggtg

SEQ ID NO: 7784 - DNA, 15 bp, synthetic construct
  source 1..15: mol_type = other DNA
tgctactgtgctata

SEQ ID NO: 7785 - DNA, 15 bp, synthetic construct
  source 1..15: mol_type = other DNA
tttttgtgtcaattc

SEQ ID NO: 7786 - DNA, 15 bp, synthetic construct
  source 1..15: mol_type = other DNA
aagggacttcagagc

SEQ ID NO: 7787 - DNA, 15 bp, synthetic construct
  source 1..15: mol_type = other DNA
gaggaatgctcctga

SEQ ID NO: 7788 - DNA, 15 bp, synthetic construct
  source 1..15: mol_type = other DNA
tgatcagaaaaccct

SEQ ID NO: 7789 - DNA, 15 bp, synthetic construct
  source 1..15: mol_type = other DNA
ggtgtgagttagcac

SEQ ID NO: 7790 - DNA, 15 bp, synthetic construct
  source 1..15: mol_type = other DNA
actgcaaataagggt

SEQ ID NO: 7791 - DNA, 15 bp, synthetic construct
  source 1..15: mol_type = other DNA
tgggtgctggactgc

SEQ ID NO: 7792 - DNA, 15 bp, synthetic construct
  source 1..15: mol_type = other DNA
agaccacttcataga

SEQ ID NO: 7793 - DNA, 15 bp, synthetic construct
  source 1..15: mol_type = other DNA
aaagtggacaagaaa

SEQ ID NO: 7794 - DNA, 15 bp, synthetic construct
  source 1..15: mol_type = other DNA
tttgaaagtgacaga

SEQ ID NO: 7795 - DNA, 15 bp, synthetic construct
  source 1..15: mol_type = other DNA
caaaaatactaaccc

SEQ ID NO: 7796 - DNA, 15 bp, synthetic construct
  source 1..15: mol_type = other DNA
tgtttgcaagacatg

SEQ ID NO: 7797 - DNA, 15 bp, synthetic construct
  source 1..15: mol_type = other DNA
caagagtctgaatct

SEQ ID NO: 7798 - DNA, 15 bp, synthetic construct
  source 1..15: mol_type = other DNA
gctgttctaaaggac

SEQ ID NO: 7799 - DNA, 15 bp, synthetic construct
  source 1..15: mol_type = other DNA
acttctcaatcttac

SEQ ID NO: 7800 - DNA, 15 bp, synthetic construct
  source 1..15: mol_type = other DNA
tagatacctaaccag

SEQ ID NO: 7801 - DNA, 15 bp, synthetic construct
  source 1..15: mol_type = other DNA
tttatcactgttcct

SEQ ID NO: 7802 - DNA, 15 bp, synthetic construct
  source 1..15: mol_type = other DNA
aatatgattcctcca

SEQ ID NO: 7803 - DNA, 15 bp, synthetic construct
  source 1..15: mol_type = other DNA
aacttaaggaactga

SEQ ID NO: 7804 - DNA, 15 bp, synthetic construct
  source 1..15: mol_type = other DNA
ataccctcttccaga

SEQ ID NO: 7805 - DNA, 15 bp, synthetic construct
  source 1..15: mol_type = other DNA
aactaatggctggat

SEQ ID NO: 7806 - DNA, 15 bp, synthetic construct
  source 1..15: mol_type = other DNA
gtttcagattttatt

SEQ ID NO: 7807 - DNA, 15 bp, synthetic construct
  source 1..15: mol_type = other DNA
aaacatggagttgga

SEQ ID NO: 7808 - DNA, 15 bp, synthetic construct
  source 1..15: mol_type = other DNA
aggtttgtagtactg

SEQ ID NO: 7809 - DNA, 15 bp, synthetic construct
  source 1..15: mol_type = other DNA
catgaaacaagaatc

SEQ ID NO: 7810 - DNA, 15 bp, synthetic construct
  source 1..15: mol_type = other DNA
cattacctttcttac

SEQ ID NO: 7811 - DNA, 15 bp, synthetic construct
  source 1..15: mol_type = other DNA
ttttaatgcagcaat

SEQ ID NO: 7812 - DNA, 15 bp, synthetic construct
  source 1..15: mol_type = other DNA
tatctgtggcgtact

SEQ ID NO: 7813 - DNA, 15 bp, synthetic construct
  source 1..15: mol_type = other DNA
tgattcagggatttt

SEQ ID NO: 7814 - DNA, 15 bp, synthetic construct
  source 1..15: mol_type = other DNA
atcagaatgagaaca

SEQ ID NO: 7815 - DNA, 15 bp, synthetic construct
  source 1..15: mol_type = other DNA
ttattactctgggaa

SEQ ID NO: 7816 - DNA, 15 bp, synthetic construct
  source 1..15: mol_type = other DNA
gtgcttgtcttcacg

SEQ ID NO: 7817 - DNA, 15 bp, synthetic construct
  source 1..15: mol_type = other DNA
agaaacaatgaccta

SEQ ID NO: 7818 - DNA, 15 bp, synthetic construct
  source 1..15: mol_type = other DNA
tcccttgaagttttt

SEQ ID NO: 7819 - DNA, 15 bp, synthetic construct
  source 1..15: mol_type = other DNA
tttcaatgtcccaag

SEQ ID NO: 7820 - DNA, 15 bp, synthetic construct
  source 1..15: mol_type = other DNA
aaagtctgagccact

SEQ ID NO: 7821 - DNA, 15 bp, synthetic construct
  source 1..15: mol_type = other DNA
ggtaattgctaggtg

SEQ ID NO: 7822 - DNA, 15 bp, synthetic construct
  source 1..15: mol_type = other DNA
ttagcaaactacatg

SEQ ID NO: 7823 - DNA, 15 bp, synthetic construct
  source 1..15: mol_type = other DNA
taggtttccaaataa

SEQ ID NO: 7824 - DNA, 15 bp, synthetic construct
  source 1..15: mol_type = other DNA
tcagttgtcgatcct

SEQ ID NO: 7825 - DNA, 15 bp, synthetic construct
  source 1..15: mol_type = other DNA
gtatgtggtaggaag

SEQ ID NO: 7826 - DNA, 15 bp, synthetic construct
  source 1..15: mol_type = other DNA
aacaattaggatgcc

SEQ ID NO: 7827 - DNA, 15 bp, synthetic construct
  source 1..15: mol_type = other DNA
gcaggattctcactc

SEQ ID NO: 7828 - DNA, 15 bp, synthetic construct
  source 1..15: mol_type = other DNA
caatagaagcaaaac

SEQ ID NO: 7829 - DNA, 15 bp, synthetic construct
  source 1..15: mol_type = other DNA
gatagttgcttcacc

SEQ ID NO: 7830 - DNA, 15 bp, synthetic construct
  source 1..15: mol_type = other DNA
ccatacaagtgagtc

SEQ ID NO: 7831 - DNA, 15 bp, synthetic construct
  source 1..15: mol_type = other DNA
gatagttgcttcacc

SEQ ID NO: 7832 - DNA, 15 bp, synthetic construct
  source 1..15: mol_type = other DNA
ccatacaagtgagtc

SEQ ID NO: 7833 - DNA, 15 bp, synthetic construct
  source 1..15: mol_type = other DNA
ttcctaatctcccta

SEQ ID NO: 7834 - DNA, 15 bp, synthetic construct
  source 1..15: mol_type = other DNA
tcccaatccagaaaa

SEQ ID NO: 7835 - DNA, 15 bp, synthetic construct
  source 1..15: mol_type = other DNA
catacctagcatgtg

SEQ ID NO: 7836 - DNA, 15 bp, synthetic construct
  source 1..15: mol_type = other DNA
tgctttacccttcca

SEQ ID NO: 7837 - DNA, 15 bp, synthetic construct
  source 1..15: mol_type = other DNA
aagaaaaccatgtgg

SEQ ID NO: 7838 - DNA, 15 bp, synthetic construct
  source 1..15: mol_type = other DNA
gtgaatcagtttata

SEQ ID NO: 7839 - DNA, 15 bp, synthetic construct
  source 1..15: mol_type = other DNA
tttttaacttctcaa

SEQ ID NO: 7840 - DNA, 15 bp, synthetic construct
  source 1..15: mol_type = other DNA
aagtagccactgtta

SEQ ID NO: 7841 - DNA, 15 bp, synthetic construct
  source 1..15: mol_type = other DNA
cttgatagaattgtc

SEQ ID NO: 7842 - DNA, 15 bp, synthetic construct
  source 1..15: mol_type = other DNA
cgacttcttgatcta

SEQ ID NO: 7843 - DNA, 15 bp, synthetic construct
  source 1..15: mol_type = other DNA
cagcactgatgattt

SEQ ID NO: 7844 - DNA, 15 bp, synthetic construct
  source 1..15: mol_type = other DNA
tgctaagcggcaaaa

SEQ ID NO: 7845 - DNA, 15 bp, synthetic construct
  source 1..15: mol_type = other DNA
ttctccttgtttggt

SEQ ID NO: 7846 - DNA, 15 bp, synthetic construct
  source 1..15: mol_type = other DNA
gtgtaaggtttctgt

SEQ ID NO: 7847 - DNA, 15 bp, synthetic construct
  source 1..15: mol_type = other DNA
aggctgagtattgta

SEQ ID NO: 7848 - DNA, 15 bp, synthetic construct
  source 1..15: mol_type = other DNA
taattcctgtcagca

SEQ ID NO: 7849 - DNA, 15 bp, synthetic construct
  source 1..15: mol_type = other DNA
ggcttaggtattgca

SEQ ID NO: 7850 - DNA, 15 bp, synthetic construct
  source 1..15: mol_type = other DNA
tagcagtaccaattt

SEQ ID NO: 7851 - DNA, 15 bp, synthetic construct
  source 1..15: mol_type = other DNA
accggtgctgttatt

SEQ ID NO: 7852 - DNA, 15 bp, synthetic construct
  source 1..15: mol_type = other DNA
caatatgtccctgta

SEQ ID NO: 7853 - DNA, 15 bp, synthetic construct
  source 1..15: mol_type = other DNA
ttgatgtaaatgaag

SEQ ID NO: 7854 - DNA, 15 bp, synthetic construct
  source 1..15: mol_type = other DNA
aaagtcaacagatga

SEQ ID NO: 7855 - DNA, 15 bp, synthetic construct
  source 1..15: mol_type = other DNA
aaagagaggttacta

SEQ ID NO: 7856 - DNA, 15 bp, synthetic construct
  source 1..15: mol_type = other DNA
atctgttatttttat

SEQ ID NO: 7857 - DNA, 15 bp, synthetic construct
  source 1..15: mol_type = other DNA
catttcagggtctta

SEQ ID NO: 7858 - DNA, 15 bp, synthetic construct
  source 1..15: mol_type = other DNA
cttactggagccaag

SEQ ID NO: 7859 - DNA, 15 bp, synthetic construct
  source 1..15: mol_type = other DNA
tttatgtcatcacct

SEQ ID NO: 7860 - DNA, 15 bp, synthetic construct
  source 1..15: mol_type = other DNA
taacagcaatgattt

SEQ ID NO: 7861 - DNA, 15 bp, synthetic construct
  source 1..15: mol_type = other DNA
tggtgacctgctgat

SEQ ID NO: 7862 - DNA, 15 bp, synthetic construct
  source 1..15: mol_type = other DNA
atatttcaaggtcat

SEQ ID NO: 7863 - DNA, 15 bp, synthetic construct
  source 1..15: mol_type = other DNA
cctccgaaactggtg

SEQ ID NO: 7864 - DNA, 15 bp, synthetic construct
  source 1..15: mol_type = other DNA
cttttcaaggcacaa

SEQ ID NO: 7865 - DNA, 15 bp, synthetic construct
  source 1..15: mol_type = other DNA
ttcccaatcttgagc

SEQ ID NO: 7866 - DNA, 15 bp, synthetic construct
  source 1..15: mol_type = other DNA
ttactttaatgaaga

SEQ ID NO: 7867 - DNA, 15 bp, synthetic construct
  source 1..15: mol_type = other DNA
gaattaaaccaaaaa

SEQ ID NO: 7868 - DNA, 15 bp, synthetic construct
  source 1..15: mol_type = other DNA
gtttcttttgtagtg

SEQ ID NO: 7869 - DNA, 15 bp, synthetic construct
  source 1..15: mol_type = other DNA
tgtgtcaccgctagc

SEQ ID NO: 7870 - DNA, 15 bp, synthetic construct
  source 1..15: mol_type = other DNA
tctccccaattcatc

SEQ ID NO: 7871 - DNA, 15 bp, synthetic construct
  source 1..15: mol_type = other DNA
cttccttcattggca

SEQ ID NO: 7872 - DNA, 15 bp, synthetic construct
  source 1..15: mol_type = other DNA
ctttgtgcttgattt

SEQ ID NO: 7873 - DNA, 15 bp, synthetic construct
  source 1..15: mol_type = other DNA
acatacagctcacga

SEQ ID NO: 7874 - DNA, 15 bp, synthetic construct
  source 1..15: mol_type = other DNA
aagtgctctggacta

SEQ ID NO: 7875 - DNA, 15 bp, synthetic construct
  source 1..15: mol_type = other DNA
ccttaccagtgcagt

SEQ ID NO: 7876 - DNA, 15 bp, synthetic construct
  source 1..15: mol_type = other DNA
gataatcccagtggt

SEQ ID NO: 7877 - DNA, 15 bp, synthetic construct
  source 1..15: mol_type = other DNA
ccaaatacatggcac

SEQ ID NO: 7878 - DNA, 15 bp, synthetic construct
  source 1..15: mol_type = other DNA
gaataacttttgtgt

SEQ ID NO: 7879 - DNA, 15 bp, synthetic construct
  source 1..15: mol_type = other DNA
gcctatgtccattct

SEQ ID NO: 7880 - DNA, 15 bp, synthetic construct
  source 1..15: mol_type = other DNA
ttctcagggtgagtt

SEQ ID NO: 7881 - DNA, 15 bp, synthetic construct
  source 1..15: mol_type = other DNA
ctctctaaacccaag

SEQ ID NO: 7882 - DNA, 15 bp, synthetic construct
  source 1..15: mol_type = other DNA
gtcattttcatcacg

SEQ ID NO: 7883 - DNA, 15 bp, synthetic construct
  source 1..15: mol_type = other DNA
tgacataatcaagta

SEQ ID NO: 7884 - DNA, 15 bp, synthetic construct
  source 1..15: mol_type = other DNA
ttctgcaatttatcc

SEQ ID NO: 7885 - DNA, 15 bp, synthetic construct
  source 1..15: mol_type = other DNA
gatgtttgtagaggg

SEQ ID NO: 7886 - DNA, 15 bp, synthetic construct
  source 1..15: mol_type = other DNA
ctatcttgtgtatgt

SEQ ID NO: 7887 - DNA, 15 bp, synthetic construct
  source 1..15: mol_type = other DNA
atcagtgtgatcaga

SEQ ID NO: 7888 - DNA, 15 bp, synthetic construct
  source 1..15: mol_type = other DNA
caactccagtagaac

SEQ ID NO: 7889 - DNA, 15 bp, synthetic construct
  source 1..15: mol_type = other DNA
gtctcctcaagatag

SEQ ID NO: 7890 - DNA, 15 bp, synthetic construct
  source 1..15: mol_type = other DNA
tgcaccagtagttgg

SEQ ID NO: 7891 - DNA, 15 bp, synthetic construct
  source 1..15: mol_type = other DNA
tgaattttcaagtgc

SEQ ID NO: 7892 - DNA, 15 bp, synthetic construct
  source 1..15: mol_type = other DNA
atctgatcctactta

SEQ ID NO: 7893 - DNA, 15 bp, synthetic construct
  source 1..15: mol_type = other DNA
aagatgttcaaggac

SEQ ID NO: 7894 - DNA, 15 bp, synthetic construct
  source 1..15: mol_type = other DNA
ggatgattgatgtct

SEQ ID NO: 7895 - DNA, 15 bp, synthetic construct
  source 1..15: mol_type = other DNA
aaaacccaaaaatgc

SEQ ID NO: 7896 - DNA, 15 bp, synthetic construct
  source 1..15: mol_type = other DNA
gattctgaatgagag

SEQ ID NO: 7897 - DNA, 15 bp, synthetic construct
  source 1..15: mol_type = other DNA
tcacctcattgtctg

SEQ ID NO: 7898 - DNA, 15 bp, synthetic construct
  source 1..15: mol_type = other DNA
cccgcatgcaaatcg

SEQ ID NO: 7899 - DNA, 15 bp, synthetic construct
  source 1..15: mol_type = other DNA
gttttcactttcaag

SEQ ID NO: 7900 - DNA, 15 bp, synthetic construct
  source 1..15: mol_type = other DNA
cttctccttacatct

SEQ ID NO: 7901 - DNA, 15 bp, synthetic construct
  source 1..15: mol_type = other DNA
aagacacaaagatga

SEQ ID NO: 7902 - DNA, 15 bp, synthetic construct
  source 1..15: mol_type = other DNA
ctgtctaccacatcc

SEQ ID NO: 7903 - DNA, 15 bp, synthetic construct
  source 1..15: mol_type = other DNA
acgtgtggcatctgc

SEQ ID NO: 7904 - DNA, 15 bp, synthetic construct
  source 1..15: mol_type = other DNA
gaaggttctctgttt

SEQ ID NO: 7905 - DNA, 15 bp, synthetic construct
  source 1..15: mol_type = other DNA
agacacagcttcgtt

SEQ ID NO: 7906 - DNA, 15 bp, synthetic construct
  source 1..15: mol_type = other DNA
ttggagagcgtcaat

SEQ ID NO: 7907 - DNA, 15 bp, synthetic construct
  source 1..15: mol_type = other DNA
cacggtgattaaatc

SEQ ID NO: 7908 - DNA, 15 bp, synthetic construct
  source 1..15: mol_type = other DNA
ccaaagacgcagtta

SEQ ID NO: 7909 - DNA, 15 bp, synthetic construct
  source 1..15: mol_type = other DNA
gcacatctctttatc

SEQ ID NO: 7910 - DNA, 15 bp, synthetic construct
  source 1..15: mol_type = other DNA
gcctaaaaacaggac

SEQ ID NO: 7911 - DNA, 15 bp, synthetic construct
  source 1..15: mol_type = other DNA
taaagatcccccatg

SEQ ID NO: 7912 - DNA, 15 bp, synthetic construct
  source 1..15: mol_type = other DNA
ttaaggaatgtcttc

SEQ ID NO: 7913 - DNA, 15 bp, synthetic construct
  source 1..15: mol_type = other DNA
ctcactcagaaatca

SEQ ID NO: 7914 - DNA, 15 bp, synthetic construct
  source 1..15: mol_type = other DNA
cagagaaaatcttga

SEQ ID NO: 7915 - DNA, 15 bp, synthetic construct
  source 1..15: mol_type = other DNA
tttgaggttctgagg

SEQ ID NO: 7916 - DNA, 15 bp, synthetic construct
  source 1..15: mol_type = other DNA
gggtaatgtatttca

SEQ ID NO: 7917 - DNA, 15 bp, synthetic construct
  source 1..15: mol_type = other DNA
gcaaacaggtacgga

SEQ ID NO: 7918 - DNA, 15 bp, synthetic construct
  source 1..15: mol_type = other DNA
cacaatcaccttggg

SEQ ID NO: 7919 - DNA, 15 bp, synthetic construct
  source 1..15: mol_type = other DNA
cctcaaaaagtattg

SEQ ID NO: 7920 - DNA, 15 bp, synthetic construct
  source 1..15: mol_type = other DNA
ttggcagctgttgct

SEQ ID NO: 7921 - DNA, 15 bp, synthetic construct
  source 1..15: mol_type = other DNA
acaaaatggttattg

SEQ ID NO: 7922 - DNA, 15 bp, synthetic construct
  source 1..15: mol_type = other DNA
tctcctgtagaccga

SEQ ID NO: 7923 - DNA, 15 bp, synthetic construct
  source 1..15: mol_type = other DNA
tcgagcctgctctcg

SEQ ID NO: 7924 - DNA, 15 bp, synthetic construct
  source 1..15: mol_type = other DNA
tgagggacagtgacc

SEQ ID NO: 7925 - DNA, 15 bp, synthetic construct
  source 1..15: mol_type = other DNA
tcgtcgtcctcgtcc

SEQ ID NO: 7926 - DNA, 15 bp, synthetic construct
  source 1..15: mol_type = other DNA
gatttggttccagaa

SEQ ID NO: 7927 - DNA, 15 bp, synthetic construct
  source 1..15: mol_type = other DNA
gctgcgtttccattt

SEQ ID NO: 7928 - DNA, 15 bp, synthetic construct
  source 1..15: mol_type = other DNA
accctgaggccattc

SEQ ID NO: 7929 - DNA, 15 bp, synthetic construct
  source 1..15: mol_type = other DNA
gctactgaatcggcg

SEQ ID NO: 7930 - DNA, 15 bp, synthetic construct
  source 1..15: mol_type = other DNA
gctgctggagctgga

SEQ ID NO: 7931 - DNA, 15 bp, synthetic construct
  source 1..15: mol_type = other DNA
tgttgagcttgaact

SEQ ID NO: 7932 - DNA, 15 bp, synthetic construct
  source 1..15: mol_type = other DNA
tacaagcagcaacgg

SEQ ID NO: 7933 - DNA, 15 bp, synthetic construct
  source 1..15: mol_type = other DNA
ctctggcgaggtgtc

SEQ ID NO: 7934 - DNA, 15 bp, synthetic construct
  source 1..15: mol_type = other DNA
aacccccggctctta

SEQ ID NO: 7935 - DNA, 15 bp, synthetic construct
  source 1..15: mol_type = other DNA
tgccggtggaggatg

SEQ ID NO: 7936 - DNA, 15 bp, synthetic construct
  source 1..15: mol_type = other DNA
aggcggcgctctacg

SEQ ID NO: 7937 - DNA, 15 bp, synthetic construct
  source 1..15: mol_type = other DNA
gcagctgccgctagt

SEQ ID NO: 7938 - DNA, 15 bp, synthetic construct
  source 1..15: mol_type = other DNA
tgactccgcgagccc

SEQ ID NO: 7939 - DNA, 15 bp, synthetic construct
  source 1..15: mol_type = other DNA
gttctagaaacaaac

SEQ ID NO: 7940 - DNA, 15 bp, synthetic construct
  source 1..15: mol_type = other DNA
caaacagatgtttct

SEQ ID NO: 7941 - DNA, 15 bp, synthetic construct
  source 1..15: mol_type = other DNA
cttcatgaccctcac

SEQ ID NO: 7942 - DNA, 15 bp, synthetic construct
  source 1..15: mol_type = other DNA
gcctctggttttgtc

SEQ ID NO: 7943 - DNA, 15 bp, synthetic construct
  source 1..15: mol_type = other DNA
tctactttaaataat

SEQ ID NO: 7944 - DNA, 15 bp, synthetic construct
  source 1..15: mol_type = other DNA
cttaaagcgcctact

SEQ ID NO: 7945 - DNA, 15 bp, synthetic construct
  source 1..15: mol_type = other DNA
aaaacaacgtagtct

SEQ ID NO: 7946 - DNA, 15 bp, synthetic construct
  source 1..15: mol_type = other DNA
tatggattgccttgg

SEQ ID NO: 7947 - DNA, 15 bp, synthetic construct
  source 1..15: mol_type = other DNA
gcgtgttatctctga

SEQ ID NO: 7948 - DNA, 15 bp, synthetic construct
  source 1..15: mol_type = other DNA
accgaacaagagctg

SEQ ID NO: 7949 - DNA, 15 bp, synthetic construct
  source 1..15: mol_type = other DNA
tttaaacaggccatc

SEQ ID NO: 7950 - DNA, 15 bp, synthetic construct
  source 1..15: mol_type = other DNA
aggccattgttccta

SEQ ID NO: 7951 - DNA, 15 bp, synthetic construct
  source 1..15: mol_type = other DNA
ggtcttcaggtaaga

SEQ ID NO: 7952 - DNA, 15 bp, synthetic construct
  source 1..15: mol_type = other DNA
ctgttcccctcctgt

SEQ ID NO: 7953 - DNA, 15 bp, synthetic construct
  source 1..15: mol_type = other DNA
aatatagcggtctaa

SEQ ID NO: 7954 - DNA, 15 bp, synthetic construct
  source 1..15: mol_type = other DNA
atttcctgagcgatg

SEQ ID NO: 7955 - DNA, 15 bp, synthetic construct
  source 1..15: mol_type = other DNA
tctcttcagggtgtt

SEQ ID NO: 7956 - DNA, 15 bp, synthetic construct
  source 1..15: mol_type = other DNA
gcaaattcaccaagc

SEQ ID NO: 7957 - DNA, 15 bp, synthetic construct
  source 1..15: mol_type = other DNA
tcttaagatcaaagg

SEQ ID NO: 7958 - DNA, 15 bp, synthetic construct
  source 1..15: mol_type = other DNA
cccacacttagtgtt

SEQ ID NO: 7959 - DNA, 15 bp, synthetic construct
  source 1..15: mol_type = other DNA
gaagagcaacactaa

SEQ ID NO: 7960 - DNA, 15 bp, synthetic construct
  source 1..15: mol_type = other DNA
atcaaggttccagac

SEQ ID NO: 7961 - DNA, 15 bp, synthetic construct
  source 1..15: mol_type = other DNA
ttccggaggtatcgc

SEQ ID NO: 7962 - DNA, 15 bp, synthetic construct
  source 1..15: mol_type = other DNA
caccgtattagcaca

SEQ ID NO: 7963 - DNA, 15 bp, synthetic construct
  source 1..15: mol_type = other DNA
acagttgactgatca

SEQ ID NO: 7964 - DNA, 15 bp, synthetic construct
  source 1..15: mol_type = other DNA
tcacactcattttcc

SEQ ID NO: 7965 - DNA, 15 bp, synthetic construct
  source 1..15: mol_type = other DNA
tacccattcaatcct

SEQ ID NO: 7966 - DNA, 15 bp, synthetic construct
  source 1..15: mol_type = other DNA
aatgaaccggaagag

SEQ ID NO: 7967 - DNA, 15 bp, synthetic construct
  source 1..15: mol_type = other DNA
gttcttacctgttgg

SEQ ID NO: 7968 - DNA, 15 bp, synthetic construct
  source 1..15: mol_type = other DNA
cagcggatagtcaat

SEQ ID NO: 7969 - DNA, 15 bp, synthetic construct
  source 1..15: mol_type = other DNA
tcatcagaaaacttc

SEQ ID NO: 7970 - DNA, 15 bp, synthetic construct
  source 1..15: mol_type = other DNA
gaagagacgcaattc

SEQ ID NO: 7971 - DNA, 15 bp, synthetic construct
  source 1..15: mol_type = other DNA
ctcgttctccagatc

SEQ ID NO: 7972 - DNA, 15 bp, synthetic construct
  source 1..15: mol_type = other DNA
aaagctctcaccaat

SEQ ID NO: 7973 - DNA, 15 bp, synthetic construct
  source 1..15: mol_type = other DNA
cagagccgttattcc

SEQ ID NO: 7974 - DNA, 15 bp, synthetic construct
  source 1..15: mol_type = other DNA
ttagagggcttcgat

SEQ ID NO: 7975 - DNA, 15 bp, synthetic construct
  source 1..15: mol_type = other DNA
cttaaagttctgctc

SEQ ID NO: 7976 - DNA, 15 bp, synthetic construct
  source 1..15: mol_type = other DNA
gcagctcaactgcgt

SEQ ID NO: 7977 - DNA, 15 bp, synthetic construct
  source 1..15: mol_type = other DNA
atgcggttgccattg

SEQ ID NO: 7978 - DNA, 15 bp, synthetic construct
  source 1..15: mol_type = other DNA
agcttcagcatgaaa

SEQ ID NO: 7979 - DNA, 15 bp, synthetic construct
  source 1..15: mol_type = other DNA
ccccagctttgaggg

SEQ ID NO: 7980 - DNA, 15 bp, synthetic construct
  source 1..15: mol_type = other DNA
ccgtcatcagcgttt

SEQ ID NO: 7981 - DNA, 15 bp, synthetic construct
  source 1..15: mol_type = other DNA
agagtcgtcattgcc

SEQ ID NO: 7982 - DNA, 15 bp, synthetic construct
  source 1..15: mol_type = other DNA
ggcttgaagagtttg

SEQ ID NO: 7983 - DNA, 15 bp, synthetic construct
  source 1..15: mol_type = other DNA
gtcttgttttggaga

SEQ ID NO: 7984 - DNA, 15 bp, synthetic construct
  source 1..15: mol_type = other DNA
tattatgagcagcct

SEQ ID NO: 7985 - DNA, 15 bp, synthetic construct
  source 1..15: mol_type = other DNA
caagtctaggcgata

SEQ ID NO: 7986 - DNA, 15 bp, synthetic construct
  source 1..15: mol_type = other DNA
ggttgcctatctttg

SEQ ID NO: 7987 - DNA, 15 bp, synthetic construct
  source 1..15: mol_type = other DNA
gtgagaagtactgtg

SEQ ID NO: 7988 - DNA, 15 bp, synthetic construct
  source 1..15: mol_type = other DNA
gcttagtatattgct

SEQ ID NO: 7989 - DNA, 15 bp, synthetic construct
  source 1..15: mol_type = other DNA
atgcttacaacattt

SEQ ID NO: 7990 - DNA, 15 bp, synthetic construct
  source 1..15: mol_type = other DNA
gcatggcgaggtaca

SEQ ID NO: 7991 - DNA, 15 bp, synthetic construct
  source 1..15: mol_type = other DNA
aaaaggtaatcaaga

SEQ ID NO: 7992 - DNA, 15 bp, synthetic construct
  source 1..15: mol_type = other DNA
catgatcctaacacg

SEQ ID NO: 7993 - DNA, 15 bp, synthetic construct
  source 1..15: mol_type = other DNA
cgcaagtctagctta

SEQ ID NO: 7994 - DNA, 15 bp, synthetic construct
  source 1..15: mol_type = other DNA
cctcgtttcgatctt

SEQ ID NO: 7995 - DNA, 15 bp, synthetic construct
  source 1..15: mol_type = other DNA
tcgcagtaaattgtt

SEQ ID NO: 7996 - DNA, 15 bp, synthetic construct
  source 1..15: mol_type = other DNA
agtaccgaggcatgg

SEQ ID NO: 7997 - DNA, 15 bp, synthetic construct
  source 1..15: mol_type = other DNA
tattcatgagatgta

SEQ ID NO: 7998 - DNA, 15 bp, synthetic construct
  source 1..15: mol_type = other DNA
ctgatgtttcttcct

SEQ ID NO: 7999 - DNA, 15 bp, synthetic construct
  source 1..15: mol_type = other DNA
tacacgtagagactc

SEQ ID NO: 8000 - DNA, 15 bp, synthetic construct
  source 1..15: mol_type = other DNA
tctggtggtaggaag

SEQ ID NO: 8001 - DNA, 15 bp, synthetic construct
  source 1..15: mol_type = other DNA
gagggactgtataag

SEQ ID NO: 8002 - DNA, 15 bp, synthetic construct
  source 1..15: mol_type = other DNA
tcagattcagtaaca

SEQ ID NO: 8003 - DNA, 15 bp, synthetic construct
  source 1..15: mol_type = other DNA
gagaatctgtgcata

SEQ ID NO: 8004 - DNA, 15 bp, synthetic construct
  source 1..15: mol_type = other DNA
ggactgccattatta

SEQ ID NO: 8005 - DNA, 15 bp, synthetic construct
  source 1..15: mol_type = other DNA
gttttgatgttgtga

SEQ ID NO: 8006 - DNA, 15 bp, synthetic construct
  source 1..15: mol_type = other DNA
ctgagaaacaattgc

SEQ ID NO: 8007 - DNA, 15 bp, synthetic construct
  source 1..15: mol_type = other DNA
tgctgagcaattaca

SEQ ID NO: 8008 - DNA, 15 bp, synthetic construct
  source 1..15: mol_type = other DNA
gcactgcccatcata

SEQ ID NO: 8009 - DNA, 15 bp, synthetic construct
  source 1..15: mol_type = other DNA
agtgctaattcagtt

SEQ ID NO: 8010 - DNA, 15 bp, synthetic construct
  source 1..15: mol_type = other DNA
catgaaggtgaagat

SEQ ID NO: 8011 - DNA, 15 bp, synthetic construct
  source 1..15: mol_type = other DNA
aaatcagcattgtta

SEQ ID NO: 8012 - DNA, 15 bp, synthetic construct
  source 1..15: mol_type = other DNA
agtagctgacagctt

SEQ ID NO: 8013 - DNA, 15 bp, synthetic construct
  source 1..15: mol_type = other DNA
gtccacatttagagt

SEQ ID NO: 8014 - DNA, 15 bp, synthetic construct
  source 1..15: mol_type = other DNA
gattggtgattttga

SEQ ID NO: 8015 - DNA, 15 bp, synthetic construct
  source 1..15: mol_type = other DNA
ccataatgtcactat

SEQ ID NO: 8016 - DNA, 15 bp, synthetic construct
  source 1..15: mol_type = other DNA
aatgcatctttaggg

SEQ ID NO: 8017 - DNA, 15 bp, synthetic construct
  source 1..15: mol_type = other DNA
gtttatatatgttag

SEQ ID NO: 8018 - DNA, 15 bp, synthetic construct
  source 1..15: mol_type = other DNA
ctaagaatcagagat

SEQ ID NO: 8019 - DNA, 15 bp, synthetic construct
  source 1..15: mol_type = other DNA
agacacatggaaatt

SEQ ID NO: 8020 - DNA, 15 bp, synthetic construct
  source 1..15: mol_type = other DNA
aattcatcagtgtgg

SEQ ID NO: 8021 - DNA, 15 bp, synthetic construct
  source 1..15: mol_type = other DNA
atagagttctccttt

SEQ ID NO: 8022 - DNA, 15 bp, synthetic construct
  source 1..15: mol_type = other DNA
tagctgtttccagtg

SEQ ID NO: 8023 - DNA, 15 bp, synthetic construct
  source 1..15: mol_type = other DNA
cttgcaccggatggg

SEQ ID NO: 8024 - DNA, 15 bp, synthetic construct
  source 1..15: mol_type = other DNA
acctgcacggcatcc

SEQ ID NO: 8025 - DNA, 15 bp, synthetic construct
  source 1..15: mol_type = other DNA
cggcaatagagctgc

SEQ ID NO: 8026 - DNA, 15 bp, synthetic construct
  source 1..15: mol_type = other DNA
acaacactctttact

SEQ ID NO: 8027 - DNA, 15 bp, synthetic construct
  source 1..15: mol_type = other DNA
gggttacagctgacg

SEQ ID NO: 8028 - DNA, 15 bp, synthetic construct
  source 1..15: mol_type = other DNA
cccatcacaggagta

SEQ ID NO: 8029 - DNA, 15 bp, synthetic construct
  source 1..15: mol_type = other DNA
gaagacggaatcctc

SEQ ID NO: 8030 - DNA, 15 bp, synthetic construct
  source 1..15: mol_type = other DNA
gacctggaccgcatc

SEQ ID NO: 8031 - DNA, 15 bp, synthetic construct
  source 1..15: mol_type = other DNA
gaagacggaatcctc

SEQ ID NO: 8032 - DNA, 15 bp, synthetic construct
  source 1..15: mol_type = other DNA
gacctggaccgcatc

SEQ ID NO: 8033 - DNA, 15 bp, synthetic construct
  source 1..15: mol_type = other DNA
tggttggaggtcaag

SEQ ID NO: 8034 - DNA, 15 bp, synthetic construct
  source 1..15: mol_type = other DNA
agcccgaggagatgt

SEQ ID NO: 8035 - DNA, 15 bp, synthetic construct
  source 1..15: mol_type = other DNA
atggatactctctag

SEQ ID NO: 8036 - DNA, 15 bp, synthetic construct
  source 1..15: mol_type = other DNA
gcaggtggtctttcg

SEQ ID NO: 8037 - DNA, 15 bp, synthetic construct
  source 1..15: mol_type = other DNA
cgttggtgcagttac

SEQ ID NO: 8038 - DNA, 15 bp, synthetic construct
  source 1..15: mol_type = other DNA
aaaggctgatctgtt

SEQ ID NO: 8039 - DNA, 15 bp, synthetic construct
  source 1..15: mol_type = other DNA
attgctattacaaac

SEQ ID NO: 8040 - DNA, 15 bp, synthetic construct
  source 1..15: mol_type = other DNA
aaccaacgtgagtgc

SEQ ID NO: 8041 - DNA, 15 bp, synthetic construct
  source 1..15: mol_type = other DNA
tctcagatgaaacca

SEQ ID NO: 8042 - DNA, 15 bp, synthetic construct
  source 1..15: mol_type = other DNA
aagtcggctagttgc

SEQ ID NO: 8043 - DNA, 15 bp, synthetic construct
  source 1..15: mol_type = other DNA
ataagtcacaggctg

SEQ ID NO: 8044 - DNA, 15 bp, synthetic construct
  source 1..15: mol_type = other DNA
catcgtggagtatgc

SEQ ID NO: 8045 - DNA, 15 bp, synthetic construct
  source 1..15: mol_type = other DNA
ccacaccttcttgga

SEQ ID NO: 8046 - DNA, 15 bp, synthetic construct
  source 1..15: mol_type = other DNA
ggtgaagccaaacct

SEQ ID NO: 8047 - DNA, 15 bp, synthetic construct
  source 1..15: mol_type = other DNA
acacattttaaacct

SEQ ID NO: 8048 - DNA, 15 bp, synthetic construct
  source 1..15: mol_type = other DNA
ttaaagcggacgcaa

SEQ ID NO: 8049 - DNA, 15 bp, synthetic construct
  source 1..15: mol_type = other DNA
atgatattcttatgc

SEQ ID NO: 8050 - DNA, 15 bp, synthetic construct
  source 1..15: mol_type = other DNA
ctattgcaacaacgg

SEQ ID NO: 8051 - DNA, 15 bp, synthetic construct
  source 1..15: mol_type = other DNA
aatgggacaagattt

SEQ ID NO: 8052 - DNA, 15 bp, synthetic construct
  source 1..15: mol_type = other DNA
gtgaaatacagagag

SEQ ID NO: 8053 - DNA, 15 bp, synthetic construct
  source 1..15: mol_type = other DNA
atagcaagcaaggaa

SEQ ID NO: 8054 - DNA, 15 bp, synthetic construct
  source 1..15: mol_type = other DNA
tgggaaggagtcacc

SEQ ID NO: 8055 - DNA, 15 bp, synthetic construct
  source 1..15: mol_type = other DNA
ggcccaaagctataa

SEQ ID NO: 8056 - DNA, 15 bp, synthetic construct
  source 1..15: mol_type = other DNA
catcatctattgcac

SEQ ID NO: 8057 - DNA, 15 bp, synthetic construct
  source 1..15: mol_type = other DNA
gtaccactcttcatc

SEQ ID NO: 8058 - DNA, 15 bp, synthetic construct
  source 1..15: mol_type = other DNA
ttgccatggttcttc

SEQ ID NO: 8059 - DNA, 15 bp, synthetic construct
  source 1..15: mol_type = other DNA
ctgagaggattcagc

SEQ ID NO: 8060 - DNA, 15 bp, synthetic construct
  source 1..15: mol_type = other DNA
cgggtaactctatcg

SEQ ID NO: 8061 - DNA, 15 bp, synthetic construct
  source 1..15: mol_type = other DNA
taccttccagaacgg

SEQ ID NO: 8062 - DNA, 15 bp, synthetic construct
  source 1..15: mol_type = other DNA
ttcttcctctagtcc

SEQ ID NO: 8063 - DNA, 15 bp, synthetic construct
  source 1..15: mol_type = other DNA
tgagatggagtgtgt

SEQ ID NO: 8064 - DNA, 15 bp, synthetic construct
  source 1..15: mol_type = other DNA
gagttcatgtgtaag

SEQ ID NO: 8065 - DNA, 15 bp, synthetic construct
  source 1..15: mol_type = other DNA
tcgatgtgctttagc

SEQ ID NO: 8066 - DNA, 15 bp, synthetic construct
  source 1..15: mol_type = other DNA
ctgggaggtttacaa

SEQ ID NO: 8067 - DNA, 15 bp, synthetic construct
  source 1..15: mol_type = other DNA
cactaaactcattcc

SEQ ID NO: 8068 - DNA, 15 bp, synthetic construct
  source 1..15: mol_type = other DNA
gaccctcaatgtatc

SEQ ID NO: 8069 - DNA, 15 bp, synthetic construct
  source 1..15: mol_type = other DNA
tcaggacttcctaac

SEQ ID NO: 8070 - DNA, 15 bp, synthetic construct
  source 1..15: mol_type = other DNA
agctccatattggac

SEQ ID NO: 8071 - DNA, 15 bp, synthetic construct
  source 1..15: mol_type = other DNA
aatttcttttccatc

SEQ ID NO: 8072 - DNA, 15 bp, synthetic construct
  source 1..15: mol_type = other DNA
attgggtttaagagg

SEQ ID NO: 8073 - DNA, 15 bp, synthetic construct
  source 1..15: mol_type = other DNA
ggcagtaagatagga

SEQ ID NO: 8074 - DNA, 15 bp, synthetic construct
  source 1..15: mol_type = other DNA
agatcatcactaagg

SEQ ID NO: 8075 - DNA, 15 bp, synthetic construct
  source 1..15: mol_type = other DNA
accttcctctgaaac

SEQ ID NO: 8076 - DNA, 15 bp, synthetic construct
  source 1..15: mol_type = other DNA
atgcttgcgtaacca

SEQ ID NO: 8077 - DNA, 15 bp, synthetic construct
  source 1..15: mol_type = other DNA
ctaccaacctgaaac

SEQ ID NO: 8078 - DNA, 15 bp, synthetic construct
  source 1..15: mol_type = other DNA
gaagtggagtccttc

SEQ ID NO: 8079 - DNA, 15 bp, synthetic construct
  source 1..15: mol_type = other DNA
tgctctgcacatcgt

SEQ ID NO: 8080 - DNA, 15 bp, synthetic construct
  source 1..15: mol_type = other DNA
cctccagtaagtgat

SEQ ID NO: 8081 - DNA, 15 bp, synthetic construct
  source 1..15: mol_type = other DNA
aaagcaacttaaaag

SEQ ID NO: 8082 - DNA, 15 bp, synthetic construct
  source 1..15: mol_type = other DNA
gctctccttctattt

SEQ ID NO: 8083 - DNA, 15 bp, synthetic construct
  source 1..15: mol_type = other DNA
ctcctacaggaaggg

SEQ ID NO: 8084 - DNA, 15 bp, synthetic construct
  source 1..15: mol_type = other DNA
acctctaactgcaga

SEQ ID NO: 8085 - DNA, 15 bp, synthetic construct
  source 1..15: mol_type = other DNA
ccttgttcaggcaag

SEQ ID NO: 8086 - DNA, 15 bp, synthetic construct
  source 1..15: mol_type = other DNA
actttaccttctgtt

SEQ ID NO: 8087 - DNA, 15 bp, synthetic construct
  source 1..15: mol_type = other DNA
caatatcagctaggc

SEQ ID NO: 8088 - DNA, 15 bp, synthetic construct
  source 1..15: mol_type = other DNA
tatgttggatcagta

SEQ ID NO: 8089 - DNA, 15 bp, synthetic construct
  source 1..15: mol_type = other DNA
aatatgtgaatggga

SEQ ID NO: 8090 - DNA, 15 bp, synthetic construct
  source 1..15: mol_type = other DNA
atcatcgtctgctac

SEQ ID NO: 8091 - DNA, 15 bp, synthetic construct
  source 1..15: mol_type = other DNA
tgcgcgtcctccgag

SEQ ID NO: 8092 - DNA, 15 bp, synthetic construct
  source 1..15: mol_type = other DNA
ttcctgctgcaatcg

SEQ ID NO: 8093 - DNA, 15 bp, synthetic construct
  source 1..15: mol_type = other DNA
cggcggagggttgag

SEQ ID NO: 8094 - DNA, 15 bp, synthetic construct
  source 1..15: mol_type = other DNA
tgaaagcgttcatcg

SEQ ID NO: 8095 - DNA, 15 bp, synthetic construct
  source 1..15: mol_type = other DNA
gggcgagtcccgtat

SEQ ID NO: 8096 - DNA, 15 bp, synthetic construct
  source 1..15: mol_type = other DNA
aggacgtggccgcta

SEQ ID NO: 8097 - DNA, 15 bp, synthetic construct
  source 1..15: mol_type = other DNA
ttcaccccggttgcg

SEQ ID NO: 8098 - DNA, 15 bp, synthetic construct
  source 1..15: mol_type = other DNA
ttcagccgcttcacc

SEQ ID NO: 8099 - DNA, 15 bp, synthetic construct
  source 1..15: mol_type = other DNA
cccaactacaagtac

SEQ ID NO: 8100 - DNA, 15 bp, synthetic construct
  source 1..15: mol_type = other DNA
tgggcaacgggtagc

SEQ ID NO: 8101 - DNA, 15 bp, synthetic construct
  source 1..15: mol_type = other DNA
atgggcggccactac

SEQ ID NO: 8102 - DNA, 15 bp, synthetic construct
  source 1..15: mol_type = other DNA
gccagcgtagtccga

SEQ ID NO: 8103 - DNA, 15 bp, synthetic construct
  source 1..15: mol_type = other DNA
cccggctttcttcgc

SEQ ID NO: 8104 - DNA, 15 bp, synthetic construct
  source 1..15: mol_type = other DNA
catcgcgccgtagta

SEQ ID NO: 8105 - DNA, 15 bp, synthetic construct
  source 1..15: mol_type = other DNA
gtccctcgattccgg

SEQ ID NO: 8106 - DNA, 15 bp, synthetic construct
  source 1..15: mol_type = other DNA
attccgtgcggtcca

SEQ ID NO: 8107 - DNA, 15 bp, synthetic construct
  source 1..15: mol_type = other DNA
gcggcttccagatgc

SEQ ID NO: 8108 - DNA, 15 bp, synthetic construct
  source 1..15: mol_type = other DNA
ttcacaccggagtca

SEQ ID NO: 8109 - DNA, 15 bp, synthetic construct
  source 1..15: mol_type = other DNA
gtatctgcacttcgt

SEQ ID NO: 8110 - DNA, 15 bp, synthetic construct
  source 1..15: mol_type = other DNA
gagtctgaggatttc

SEQ ID NO: 8111 - DNA, 15 bp, synthetic construct
  source 1..15: mol_type = other DNA
ctttgagggcaaaca

SEQ ID NO: 8112 - DNA, 15 bp, synthetic construct
  source 1..15: mol_type = other DNA
atgatgaagggatgg

SEQ ID NO: 8113 - DNA, 15 bp, synthetic construct
  source 1..15: mol_type = other DNA
ggttacccggaaaat

SEQ ID NO: 8114 - DNA, 15 bp, synthetic construct
  source 1..15: mol_type = other DNA
tgcgagtgcggagac

SEQ ID NO: 8115 - DNA, 15 bp, synthetic construct
  source 1..15: mol_type = other DNA
gatgcatctgatgga

SEQ ID NO: 8116 - DNA, 15 bp, synthetic construct
  source 1..15: mol_type = other DNA
ggtctggtacctgaa

SEQ ID NO: 8117 - DNA, 15 bp, synthetic construct
  source 1..15: mol_type = other DNA
aatcctttgtggaca

SEQ ID NO: 8118 - DNA, 15 bp, synthetic construct
  source 1..15: mol_type = other DNA
tgattgaggccctct

SEQ ID NO: 8119 - DNA, 15 bp, synthetic construct
  source 1..15: mol_type = other DNA
tgggcagctatatgg

SEQ ID NO: 8120 - DNA, 15 bp, synthetic construct
  source 1..15: mol_type = other DNA
catggagagcagtag

SEQ ID NO: 8121 - DNA, 15 bp, synthetic construct
  source 1..15: mol_type = other DNA
tttattgccacctca

SEQ ID NO: 8122 - DNA, 15 bp, synthetic construct
  source 1..15: mol_type = other DNA
actgccctgagttgt

SEQ ID NO: 8123 - DNA, 15 bp, synthetic construct
  source 1..15: mol_type = other DNA
cggagccagacagtc

SEQ ID NO: 8124 - DNA, 15 bp, synthetic construct
  source 1..15: mol_type = other DNA
tgtgtgttcatttgg

SEQ ID NO: 8125 - DNA, 15 bp, synthetic construct
  source 1..15: mol_type = other DNA
cgtaccaagataccc

SEQ ID NO: 8126 - DNA, 15 bp, synthetic construct
  source 1..15: mol_type = other DNA
ggataactgccaact

SEQ ID NO: 8127 - DNA, 15 bp, synthetic construct
  source 1..15: mol_type = other DNA
gctgggataccaatg

SEQ ID NO: 8128 - DNA, 15 bp, synthetic construct
  source 1..15: mol_type = other DNA
caggatgttgttggc

SEQ ID NO: 8129 - DNA, 15 bp, synthetic construct
  source 1..15: mol_type = other DNA
tccaggaacgactga

SEQ ID NO: 8130 - DNA, 15 bp, synthetic construct
  source 1..15: mol_type = other DNA
gacaagttagccatg

SEQ ID NO: 8131 - DNA, 15 bp, synthetic construct
  source 1..15: mol_type = other DNA
ttcagttcttttctt

SEQ ID NO: 8132 - DNA, 15 bp, synthetic construct
  source 1..15: mol_type = other DNA
ctttaccaaaacctt

SEQ ID NO: 8133 - DNA, 15 bp, synthetic construct
  source 1..15: mol_type = other DNA
cacattgtagcagag

SEQ ID NO: 8134 - DNA, 15 bp, synthetic construct
  source 1..15: mol_type = other DNA
ggctctttgggaatc

SEQ ID NO: 8135 - DNA, 15 bp, synthetic construct
  source 1..15: mol_type = other DNA
ggaactcactggatg

SEQ ID NO: 8136 - DNA, 15 bp, synthetic construct
  source 1..15: mol_type = other DNA
tgtactctcaatgtt

SEQ ID NO: 8137 - DNA, 15 bp, synthetic construct
  source 1..15: mol_type = other DNA
acattaaaagtgaac

SEQ ID NO: 8138 - DNA, 15 bp, synthetic construct
  source 1..15: mol_type = other DNA
ttcatacatggctaa

SEQ ID NO: 8139 - DNA, 15 bp, synthetic construct
  source 1..15: mol_type = other DNA
aaggccactgtcttg

SEQ ID NO: 8140 - DNA, 15 bp, synthetic construct
  source 1..15: mol_type = other DNA
tgcagcaatgaaatt

SEQ ID NO: 8141 - DNA, 15 bp, synthetic construct
  source 1..15: mol_type = other DNA
actgataactttgta

SEQ ID NO: 8142 - DNA, 15 bp, synthetic construct
  source 1..15: mol_type = other DNA
caatcctgtaagagt

SEQ ID NO: 8143 - DNA, 15 bp, synthetic construct
  source 1..15: mol_type = other DNA
gctcatatgggagta

SEQ ID NO: 8144 - DNA, 15 bp, synthetic construct
  source 1..15: mol_type = other DNA
atgactaaagaaatc

SEQ ID NO: 8145 - DNA, 15 bp, synthetic construct
  source 1..15: mol_type = other DNA
ttaaatgttgctcag

SEQ ID NO: 8146 - DNA, 15 bp, synthetic construct
  source 1..15: mol_type = other DNA
tctgaaaggaacttg

SEQ ID NO: 8147 - DNA, 15 bp, synthetic construct
  source 1..15: mol_type = other DNA
tcttcattgtcagtg

SEQ ID NO: 8148 - DNA, 15 bp, synthetic construct
  source 1..15: mol_type = other DNA
caagaaccagttacc

SEQ ID NO: 8149 - DNA, 15 bp, synthetic construct
  source 1..15: mol_type = other DNA
aaatattattgcttg

SEQ ID NO: 8150 - DNA, 15 bp, synthetic construct
  source 1..15: mol_type = other DNA
ctaggattctaccat

SEQ ID NO: 8151 - DNA, 15 bp, synthetic construct
  source 1..15: mol_type = other DNA
tgaatccaattctga

SEQ ID NO: 8152 - DNA, 15 bp, synthetic construct
  source 1..15: mol_type = other DNA
gtggtttcccaaaga

SEQ ID NO: 8153 - DNA, 15 bp, synthetic construct
  source 1..15: mol_type = other DNA
atagtggtgtggtct

SEQ ID NO: 8154 - DNA, 15 bp, synthetic construct
  source 1..15: mol_type = other DNA
gaaaggaactacaga

SEQ ID NO: 8155 - DNA, 15 bp, synthetic construct
  source 1..15: mol_type = other DNA
tatccatactcatta

SEQ ID NO: 8156 - DNA, 15 bp, synthetic construct
  source 1..15: mol_type = other DNA
gaatggtccgacgac

SEQ ID NO: 8157 - DNA, 15 bp, synthetic construct
  source 1..15: mol_type = other DNA
aaatgggtttgggaa

SEQ ID NO: 8158 - DNA, 15 bp, synthetic construct
  source 1..15: mol_type = other DNA
acaaagaatacaacc

SEQ ID NO: 8159 - DNA, 15 bp, synthetic construct
  source 1..15: mol_type = other DNA
tgaaaacagaatgta

SEQ ID NO: 8160 - DNA, 15 bp, synthetic construct
  source 1..15: mol_type = other DNA
tcaatgactacacag

SEQ ID NO: 8161 - DNA, 15 bp, synthetic construct
  source 1..15: mol_type = other DNA
cttatagggtcgagt

SEQ ID NO: 8162 - DNA, 15 bp, synthetic construct
  source 1..15: mol_type = other DNA
agcaacgggactatc

SEQ ID NO: 8163 - DNA, 15 bp, synthetic construct
  source 1..15: mol_type = other DNA
aagaaagtgtttttg

SEQ ID NO: 8164 - DNA, 15 bp, synthetic construct
  source 1..15: mol_type = other DNA
tcatgggctaatctt

SEQ ID NO: 8165 - DNA, 15 bp, synthetic construct
  source 1..15: mol_type = other DNA
aaaaatgaaaatgga

SEQ ID NO: 8166 - DNA, 15 bp, synthetic construct
  source 1..15: mol_type = other DNA
aggatggctcggtaa

SEQ ID NO: 8167 - DNA, 15 bp, synthetic construct
  source 1..15: mol_type = other DNA
caaagaggatgtaga

SEQ ID NO: 8168 - DNA, 15 bp, synthetic construct
  source 1..15: mol_type = other DNA
tgcttcaatcgtcac

SEQ ID NO: 8169 - DNA, 15 bp, synthetic construct
  source 1..15: mol_type = other DNA
ttatgctgtccaatc

SEQ ID NO: 8170 - DNA, 15 bp, synthetic construct
  source 1..15: mol_type = other DNA
tctttgaatgaggta

SEQ ID NO: 8171 - DNA, 15 bp, synthetic construct
  source 1..15: mol_type = other DNA
gagtctccagatttt

SEQ ID NO: 8172 - DNA, 15 bp, synthetic construct
  source 1..15: mol_type = other DNA
atagattccactttt

SEQ ID NO: 8173 - DNA, 15 bp, synthetic construct
  source 1..15: mol_type = other DNA
tgttgtcgctatgcg

SEQ ID NO: 8174 - DNA, 15 bp, synthetic construct
  source 1..15: mol_type = other DNA
ttgtgcatttacctg

SEQ ID NO: 8175 - DNA, 15 bp, synthetic construct
  source 1..15: mol_type = other DNA
aaacctgattctgat

SEQ ID NO: 8176 - DNA, 15 bp, synthetic construct
  source 1..15: mol_type = other DNA
ctgaatcataggaca

SEQ ID NO: 8177 - DNA, 15 bp, synthetic construct
  source 1..15: mol_type = other DNA
aggttcattgcagta

SEQ ID NO: 8178 - DNA, 15 bp, synthetic construct
  source 1..15: mol_type = other DNA
atggtttgggcaagg

SEQ ID NO: 8179 - DNA, 15 bp, synthetic construct
  source 1..15: mol_type = other DNA
tctgcaaacctctta

SEQ ID NO: 8180 - DNA, 15 bp, synthetic construct
  source 1..15: mol_type = other DNA
ttagatcgattcaca

SEQ ID NO: 8181 - DNA, 15 bp, synthetic construct
  source 1..15: mol_type = other DNA
attaccattgagtca

SEQ ID NO: 8182 - DNA, 15 bp, synthetic construct
  source 1..15: mol_type = other DNA
aggatgacaaggtga

SEQ ID NO: 8183 - DNA, 15 bp, synthetic construct
  source 1..15: mol_type = other DNA
aatgcacaatatcgg

SEQ ID NO: 8184 - DNA, 15 bp, synthetic construct
  source 1..15: mol_type = other DNA
ttggtttagatcaga

SEQ ID NO: 8185 - DNA, 15 bp, synthetic construct
  source 1..15: mol_type = other DNA
aaccaagagccactc

SEQ ID NO: 8186 - DNA, 15 bp, synthetic construct
  source 1..15: mol_type = other DNA
agcagattcttctcc

SEQ ID NO: 8187 - DNA, 15 bp, synthetic construct
  source 1..15: mol_type = other DNA
tccaagagtgagaaa

SEQ ID NO: 8188 - DNA, 15 bp, synthetic construct
  source 1..15: mol_type = other DNA
cagttgggaattcta

SEQ ID NO: 8189 - DNA, 15 bp, synthetic construct
  source 1..15: mol_type = other DNA
tgttgctagttttga

SEQ ID NO: 8190 - DNA, 15 bp, synthetic construct
  source 1..15: mol_type = other DNA
ccagatgaagctttt

SEQ ID NO: 8191 - DNA, 15 bp, synthetic construct
  source 1..15: mol_type = other DNA
tctgcagaaccatcc

SEQ ID NO: 8192 - DNA, 15 bp, synthetic construct
  source 1..15: mol_type = other DNA
gcagagagcttaatg

SEQ ID NO: 8193 - DNA, 15 bp, synthetic construct
  source 1..15: mol_type = other DNA
tgacactataattgg

SEQ ID NO: 8194 - DNA, 15 bp, synthetic construct
  source 1..15: mol_type = other DNA
ttaagctctccaggt

SEQ ID NO: 8195 - DNA, 15 bp, synthetic construct
  source 1..15: mol_type = other DNA
ctaccatacagcatg

SEQ ID NO: 8196 - DNA, 15 bp, synthetic construct
  source 1..15: mol_type = other DNA
tctcactgaggttga

SEQ ID NO: 8197 - DNA, 15 bp, synthetic construct
  source 1..15: mol_type = other DNA
tcagatgtttatcgt

SEQ ID NO: 8198 - DNA, 15 bp, synthetic construct
  source 1..15: mol_type = other DNA
gccatacagttgaga

SEQ ID NO: 8199 - DNA, 15 bp, synthetic construct
  source 1..15: mol_type = other DNA
gtgtgttttctgtgc

SEQ ID NO: 8200 - DNA, 15 bp, synthetic construct
  source 1..15: mol_type = other DNA
tgtactgcagggtaa

SEQ ID NO: 8201 - DNA, 15 bp, synthetic construct
  source 1..15: mol_type = other DNA
tttcccgcaatctcc

SEQ ID NO: 8202 - DNA, 15 bp, synthetic construct
  source 1..15: mol_type = other DNA
tgaacggtgttctgg

SEQ ID NO: 8203 - DNA, 15 bp, synthetic construct
  source 1..15: mol_type = other DNA
agaagatgaagaccc

SEQ ID NO: 8204 - DNA, 15 bp, synthetic construct
  source 1..15: mol_type = other DNA
ttccttatcctctga

SEQ ID NO: 8205 - DNA, 15 bp, synthetic construct
  source 1..15: mol_type = other DNA
agaagatgaagaccc

SEQ ID NO: 8206 - DNA, 15 bp, synthetic construct
  source 1..15: mol_type = other DNA
ttccttatcctctga

SEQ ID NO: 8207 - DNA, 15 bp, synthetic construct
  source 1..15: mol_type = other DNA
ctttgctttcaagga

SEQ ID NO: 8208 - DNA, 15 bp, synthetic construct
  source 1..15: mol_type = other DNA
tgaaaacacagccat

SEQ ID NO: 8209 - DNA, 15 bp, synthetic construct
  source 1..15: mol_type = other DNA
tgcagctacacattt

SEQ ID NO: 8210 - DNA, 15 bp, synthetic construct
  source 1..15: mol_type = other DNA
gatataatagcttcc

SEQ ID NO: 8211 - DNA, 15 bp, synthetic construct
  source 1..15: mol_type = other DNA
accctgactacacgt

SEQ ID NO: 8212 - DNA, 15 bp, synthetic construct
  source 1..15: mol_type = other DNA
gagtcctgtctcttg

SEQ ID NO: 8213 - DNA, 15 bp, synthetic construct
  source 1..15: mol_type = other DNA
accatgtataaagtc

SEQ ID NO: 8214 - DNA, 15 bp, synthetic construct
  source 1..15: mol_type = other DNA
aactgaagtatttct

SEQ ID NO: 8215 - DNA, 15 bp, synthetic construct
  source 1..15: mol_type = other DNA
ttaccgtgtggtatc

SEQ ID NO: 8216 - DNA, 15 bp, synthetic construct
  source 1..15: mol_type = other DNA
acattgtacactttc

SEQ ID NO: 8217 - DNA, 15 bp, synthetic construct
  source 1..15: mol_type = other DNA
atgagcccttctgtg

SEQ ID NO: 8218 - DNA, 15 bp, synthetic construct
  source 1..15: mol_type = other DNA
tccgtccgactgacc

SEQ ID NO: 8219 - DNA, 15 bp, synthetic construct
  source 1..15: mol_type = other DNA
ctgctacggaagatc

SEQ ID NO: 8220 - DNA, 15 bp, synthetic construct
  source 1..15: mol_type = other DNA
aaggaagatgtatta

SEQ ID NO: 8221 - DNA, 15 bp, synthetic construct
  source 1..15: mol_type = other DNA
ctcaatgaccctgag

SEQ ID NO: 8222 - DNA, 15 bp, synthetic construct
  source 1..15: mol_type = other DNA
taccctctcatcttg

SEQ ID NO: 8223 - DNA, 15 bp, synthetic construct
  source 1..15: mol_type = other DNA
tgtccagactcctcc

SEQ ID NO: 8224 - DNA, 15 bp, synthetic construct
  source 1..15: mol_type = other DNA
ctgaaatagatttgg

SEQ ID NO: 8225 - DNA, 15 bp, synthetic construct
  source 1..15: mol_type = other DNA
atgaactgaaaggtg

SEQ ID NO: 8226 - DNA, 15 bp, synthetic construct
  source 1..15: mol_type = other DNA
tcgtgaaaaagagca

SEQ ID NO: 8227 - DNA, 15 bp, synthetic construct
  source 1..15: mol_type = other DNA
ctgatactgtggttg

SEQ ID NO: 8228 - DNA, 15 bp, synthetic construct
  source 1..15: mol_type = other DNA
ctaatcctttttggt

SEQ ID NO: 8229 - DNA, 15 bp, synthetic construct
  source 1..15: mol_type = other DNA
taaaatttcttgtga

SEQ ID NO: 8230 - DNA, 15 bp, synthetic construct
  source 1..15: mol_type = other DNA
aactgaggagacgta

SEQ ID NO: 8231 - DNA, 15 bp, synthetic construct
  source 1..15: mol_type = other DNA
ctgtgaagcagtgtt

SEQ ID NO: 8232 - DNA, 15 bp, synthetic construct
  source 1..15: mol_type = other DNA
cagttaaggcttaga

SEQ ID NO: 8233 - DNA, 15 bp, synthetic construct
  source 1..15: mol_type = other DNA
atgcttaattcctta

SEQ ID NO: 8234 - DNA, 15 bp, synthetic construct
  source 1..15: mol_type = other DNA
ccattttctgagacc

SEQ ID NO: 8235 - DNA, 15 bp, synthetic construct
  source 1..15: mol_type = other DNA
atctcatggagatgg

SEQ ID NO: 8236 - DNA, 15 bp, synthetic construct
  source 1..15: mol_type = other DNA
actagggagccatta

SEQ ID NO: 8237 - DNA, 15 bp, synthetic construct
  source 1..15: mol_type = other DNA
taatgtctcaacacc

SEQ ID NO: 8238 - DNA, 15 bp, synthetic construct
  source 1..15: mol_type = other DNA
aacacgtgcaatcgc

SEQ ID NO: 8239 - DNA, 15 bp, synthetic construct
  source 1..15: mol_type = other DNA
taccattgtgaactt

SEQ ID NO: 8240 - DNA, 15 bp, synthetic construct
  source 1..15: mol_type = other DNA
tactcactggtacat

SEQ ID NO: 8241 - DNA, 15 bp, synthetic construct
  source 1..15: mol_type = other DNA
tagagaccccaccaa

SEQ ID NO: 8242 - DNA, 15 bp, synthetic construct
  source 1..15: mol_type = other DNA
gttgtaagggaatga

SEQ ID NO: 8243 - DNA, 15 bp, synthetic construct
  source 1..15: mol_type = other DNA
tctttggcatttata

SEQ ID NO: 8244 - DNA, 15 bp, synthetic construct
  source 1..15: mol_type = other DNA
aagaaatcgcatagt

SEQ ID NO: 8245 - DNA, 15 bp, synthetic construct
  source 1..15: mol_type = other DNA
tgtttttaatcattt

SEQ ID NO: 8246 - DNA, 15 bp, synthetic construct
  source 1..15: mol_type = other DNA
taagaaagactaagg

SEQ ID NO: 8247 - DNA, 15 bp, synthetic construct
  source 1..15: mol_type = other DNA
gttgtcttcgacagc

SEQ ID NO: 8248 - DNA, 15 bp, synthetic construct
  source 1..15: mol_type = other DNA
attctgaaggctcgt

SEQ ID NO: 8249 - DNA, 15 bp, synthetic construct
  source 1..15: mol_type = other DNA
tttgctggtgaacag

SEQ ID NO: 8250 - DNA, 15 bp, synthetic construct
  source 1..15: mol_type = other DNA
gtggtgtttccagta

SEQ ID NO: 8251 - DNA, 15 bp, synthetic construct
  source 1..15: mol_type = other DNA
gaataaccctctgtc

SEQ ID NO: 8252 - DNA, 15 bp, synthetic construct
  source 1..15: mol_type = other DNA
aaggctagcgggttt

SEQ ID NO: 8253 - DNA, 15 bp, synthetic construct
  source 1..15: mol_type = other DNA
gaatggatctgttgg

SEQ ID NO: 8254 - DNA, 15 bp, synthetic construct
  source 1..15: mol_type = other DNA
ctccatctttaaagg

SEQ ID NO: 8255 - DNA, 15 bp, synthetic construct
  source 1..15: mol_type = other DNA
catgtttctacctcc

SEQ ID NO: 8256 - DNA, 15 bp, synthetic construct
  source 1..15: mol_type = other DNA
gtgagtctagctctt

SEQ ID NO: 8257 - DNA, 15 bp, synthetic construct
  source 1..15: mol_type = other DNA
ctccctcttagaaga

SEQ ID NO: 8258 - DNA, 15 bp, synthetic construct
  source 1..15: mol_type = other DNA
accttttgacacacc

SEQ ID NO: 8259 - DNA, 15 bp, synthetic construct
  source 1..15: mol_type = other DNA
agttgaccaagtccc

SEQ ID NO: 8260 - DNA, 15 bp, synthetic construct
  source 1..15: mol_type = other DNA
agtgctctagaggat

SEQ ID NO: 8261 - DNA, 15 bp, synthetic construct
  source 1..15: mol_type = other DNA
tgtaacctcttcggt

SEQ ID NO: 8262 - DNA, 15 bp, synthetic construct
  source 1..15: mol_type = other DNA
tgcctcgagacctac

SEQ ID NO: 8263 - DNA, 15 bp, synthetic construct
  source 1..15: mol_type = other DNA
agcctacatgttgat

SEQ ID NO: 8264 - DNA, 15 bp, synthetic construct
  source 1..15: mol_type = other DNA
tatttacacaggagt

SEQ ID NO: 8265 - DNA, 15 bp, synthetic construct
  source 1..15: mol_type = other DNA
tcatcaagctgttta

SEQ ID NO: 8266 - DNA, 15 bp, synthetic construct
  source 1..15: mol_type = other DNA
gaagagcccactaag

SEQ ID NO: 8267 - DNA, 15 bp, synthetic construct
  source 1..15: mol_type = other DNA
tcttggaataagcat

SEQ ID NO: 8268 - DNA, 15 bp, synthetic construct
  source 1..15: mol_type = other DNA
gaaacattaaaccca

SEQ ID NO: 8269 - DNA, 15 bp, synthetic construct
  source 1..15: mol_type = other DNA
aggacattgagggat

SEQ ID NO: 8270 - DNA, 15 bp, synthetic construct
  source 1..15: mol_type = other DNA
tcaacctgtggtagt

SEQ ID NO: 8271 - DNA, 15 bp, synthetic construct
  source 1..15: mol_type = other DNA
tcaagttttgtttct

SEQ ID NO: 8272 - DNA, 15 bp, synthetic construct
  source 1..15: mol_type = other DNA
catctagttgtcggt

SEQ ID NO: 8273 - DNA, 15 bp, synthetic construct
  source 1..15: mol_type = other DNA
tccttcagaggcata

SEQ ID NO: 8274 - DNA, 15 bp, synthetic construct
  source 1..15: mol_type = other DNA
ttcaggatcttggtc

SEQ ID NO: 8275 - DNA, 15 bp, synthetic construct
  source 1..15: mol_type = other DNA
ttttgatagacggta

SEQ ID NO: 8276 - DNA, 15 bp, synthetic construct
  source 1..15: mol_type = other DNA
ctgcttctccctagt

SEQ ID NO: 8277 - DNA, 15 bp, synthetic construct
  source 1..15: mol_type = other DNA
atgttgccaacatca

SEQ ID NO: 8278 - DNA, 15 bp, synthetic construct
  source 1..15: mol_type = other DNA
ggcacattctgtttc

SEQ ID NO: 8279 - DNA, 15 bp, synthetic construct
  source 1..15: mol_type = other DNA
ttttaccttaacctt

SEQ ID NO: 8280 - DNA, 15 bp, synthetic construct
  source 1..15: mol_type = other DNA
caactagttggaagt

SEQ ID NO: 8281 - DNA, 15 bp, synthetic construct
  source 1..15: mol_type = other DNA
aattgcatacgatgc

SEQ ID NO: 8282 - DNA, 15 bp, synthetic construct
  source 1..15: mol_type = other DNA
gaacgacaacccctt

SEQ ID NO: 8283 - DNA, 15 bp, synthetic construct
  source 1..15: mol_type = other DNA
catagactttgtgta

SEQ ID NO: 8284 - DNA, 15 bp, synthetic construct
  source 1..15: mol_type = other DNA
tctctttttctccca

SEQ ID NO: 8285 - DNA, 15 bp, synthetic construct
  source 1..15: mol_type = other DNA
actgtcttaagtgcc

SEQ ID NO: 8286 - DNA, 15 bp, synthetic construct
  source 1..15: mol_type = other DNA
caggatgaactgatg

SEQ ID NO: 8287 - DNA, 15 bp, synthetic construct
  source 1..15: mol_type = other DNA
tttgaagagatgata

SEQ ID NO: 8288 - DNA, 15 bp, synthetic construct
  source 1..15: mol_type = other DNA
ccgcttcagtatatc

SEQ ID NO: 8289 - DNA, 15 bp, synthetic construct
  source 1..15: mol_type = other DNA
gagtaacatcttgat

SEQ ID NO: 8290 - DNA, 15 bp, synthetic construct
  source 1..15: mol_type = other DNA
ttattgagccaagcg

SEQ ID NO: 8291 - DNA, 15 bp, synthetic construct
  source 1..15: mol_type = other DNA
cacctttttctggag

SEQ ID NO: 8292 - DNA, 15 bp, synthetic construct
  source 1..15: mol_type = other DNA
taggatggtggcttt

SEQ ID NO: 8293 - DNA, 15 bp, synthetic construct
  source 1..15: mol_type = other DNA
tcttgctttgtcgtc

SEQ ID NO: 8294 - DNA, 15 bp, synthetic construct
  source 1..15: mol_type = other DNA
ccatgcttacactta

SEQ ID NO: 8295 - DNA, 15 bp, synthetic construct
  source 1..15: mol_type = other DNA
atacttgtcagcgtt

SEQ ID NO: 8296 - DNA, 15 bp, synthetic construct
  source 1..15: mol_type = other DNA
atttccttttgcatc

SEQ ID NO: 8297 - DNA, 15 bp, synthetic construct
  source 1..15: mol_type = other DNA
gggaaagagaagaaa

SEQ ID NO: 8298 - DNA, 15 bp, synthetic construct
  source 1..15: mol_type = other DNA
gcgttgctatagagg

SEQ ID NO: 8299 - DNA, 15 bp, synthetic construct
  source 1..15: mol_type = other DNA
tgaaataaatggctt

SEQ ID NO: 8300 - DNA, 15 bp, synthetic construct
  source 1..15: mol_type = other DNA
tactgaacaatttca

SEQ ID NO: 8301 - DNA, 15 bp, synthetic construct
  source 1..15: mol_type = other DNA
tagtatgtttttgca

SEQ ID NO: 8302 - DNA, 15 bp, synthetic construct
  source 1..15: mol_type = other DNA
tctttgcaagttttg

SEQ ID NO: 8303 - DNA, 15 bp, synthetic construct
  source 1..15: mol_type = other DNA
aggagactgaaaaat

SEQ ID NO: 8304 - DNA, 15 bp, synthetic construct
  source 1..15: mol_type = other DNA
ctcttcatactcctg

SEQ ID NO: 8305 - DNA, 15 bp, synthetic construct
  source 1..15: mol_type = other DNA
tgcagaagaaaaaga

SEQ ID NO: 8306 - DNA, 15 bp, synthetic construct
  source 1..15: mol_type = other DNA
ccaacactgttctcc

SEQ ID NO: 8307 - DNA, 15 bp, synthetic construct
  source 1..15: mol_type = other DNA
agcacatttttgaat

SEQ ID NO: 8308 - DNA, 15 bp, synthetic construct
  source 1..15: mol_type = other DNA
acatttttgtctgaa

SEQ ID NO: 8309 - DNA, 15 bp, synthetic construct
  source 1..15: mol_type = other DNA
gtgtgatgaagcaaa

SEQ ID NO: 8310 - DNA, 15 bp, synthetic construct
  source 1..15: mol_type = other DNA
cattcgatcccccaa

SEQ ID NO: 8311 - DNA, 15 bp, synthetic construct
  source 1..15: mol_type = other DNA
caagcttctgtgtag

SEQ ID NO: 8312 - DNA, 15 bp, synthetic construct
  source 1..15: mol_type = other DNA
acctaaccgctctat

SEQ ID NO: 8313 - DNA, 15 bp, synthetic construct
  source 1..15: mol_type = other DNA
tgagcagtttcactt

SEQ ID NO: 8314 - DNA, 15 bp, synthetic construct
  source 1..15: mol_type = other DNA
cgaacacaaaaactg

SEQ ID NO: 8315 - DNA, 15 bp, synthetic construct
  source 1..15: mol_type = other DNA
cctatttttcctgtg

SEQ ID NO: 8316 - DNA, 15 bp, synthetic construct
  source 1..15: mol_type = other DNA
ttctgctacatcttt

SEQ ID NO: 8317 - DNA, 15 bp, synthetic construct
  source 1..15: mol_type = other DNA
ttacagtgaagtttt

SEQ ID NO: 8318 - DNA, 15 bp, synthetic construct
  source 1..15: mol_type = other DNA
tgacacagcaatgat

SEQ ID NO: 8319 - DNA, 15 bp, synthetic construct
  source 1..15: mol_type = other DNA
tgcagggctatgttt

SEQ ID NO: 8320 - DNA, 15 bp, synthetic construct
  source 1..15: mol_type = other DNA
aacttgaaaaattgt

SEQ ID NO: 8321 - DNA, 15 bp, synthetic construct
  source 1..15: mol_type = other DNA
agtcctacctctacc

SEQ ID NO: 8322 - DNA, 15 bp, synthetic construct
  source 1..15: mol_type = other DNA
agtgtggagaaaggt

SEQ ID NO: 8323 - DNA, 15 bp, synthetic construct
  source 1..15: mol_type = other DNA
tggtttagctctggg

SEQ ID NO: 8324 - DNA, 15 bp, synthetic construct
  source 1..15: mol_type = other DNA
cacacagatttagca

SEQ ID NO: 8325 - DNA, 15 bp, synthetic construct
  source 1..15: mol_type = other DNA
actgatttgtgaaca

SEQ ID NO: 8326 - DNA, 15 bp, synthetic construct
  source 1..15: mol_type = other DNA
ataggccattacact

SEQ ID NO: 8327 - DNA, 15 bp, synthetic construct
  source 1..15: mol_type = other DNA
ctctaaaatagggtg

SEQ ID NO: 8328 - DNA, 15 bp, synthetic construct
  source 1..15: mol_type = other DNA
ctacagagtttgatc

SEQ ID NO: 8329 - DNA, 15 bp, synthetic construct
  source 1..15: mol_type = other DNA
gttcactggttgacc

SEQ ID NO: 8330 - DNA, 15 bp, synthetic construct
  source 1..15: mol_type = other DNA
ccattcctttcacct

SEQ ID NO: 8331 - DNA, 15 bp, synthetic construct
  source 1..15: mol_type = other DNA
aattgctaagttctg

SEQ ID NO: 8332 - DNA, 15 bp, synthetic construct
  source 1..15: mol_type = other DNA
gtggatttccaaaaa

SEQ ID NO: 8333 - DNA, 15 bp, synthetic construct
  source 1..15: mol_type = other DNA
catcacgtttcacat

SEQ ID NO: 8334 - DNA, 15 bp, synthetic construct
  source 1..15: mol_type = other DNA
ttaggttacccaaac

SEQ ID NO: 8335 - DNA, 15 bp, synthetic construct
  source 1..15: mol_type = other DNA
ctgattgttaaaaag

SEQ ID NO: 8336 - DNA, 15 bp, synthetic construct
  source 1..15: mol_type = other DNA
cattttggagattta

SEQ ID NO: 8337 - DNA, 15 bp, synthetic construct
  source 1..15: mol_type = other DNA
atgaacaagcacgag

SEQ ID NO: 8338 - DNA, 15 bp, synthetic construct
  source 1..15: mol_type = other DNA
caaagccgaagaaat

SEQ ID NO: 8339 - DNA, 15 bp, synthetic construct
  source 1..15: mol_type = other DNA
tgtcttaacttgctg

SEQ ID NO: 8340 - DNA, 15 bp, synthetic construct
  source 1..15: mol_type = other DNA
ggactttctgttcgg

SEQ ID NO: 8341 - DNA, 15 bp, synthetic construct
  source 1..15: mol_type = other DNA
ccgaacagaaagtcc

SEQ ID NO: 8342 - DNA, 15 bp, synthetic construct
  source 1..15: mol_type = other DNA
tccaattaaggtgct

SEQ ID NO: 8343 - DNA, 15 bp, synthetic construct
  source 1..15: mol_type = other DNA
tctgtctcactattc

SEQ ID NO: 8344 - DNA, 15 bp, synthetic construct
  source 1..15: mol_type = other DNA
catgtaacctgaagt

SEQ ID NO: 8345 - DNA, 15 bp, synthetic construct
  source 1..15: mol_type = other DNA
attgccaaagaccta

SEQ ID NO: 8346 - DNA, 15 bp, synthetic construct
  source 1..15: mol_type = other DNA
attgttttccactcc

SEQ ID NO: 8347 - DNA, 15 bp, synthetic construct
  source 1..15: mol_type = other DNA
ccctcccatatctgt

SEQ ID NO: 8348 - DNA, 15 bp, synthetic construct
  source 1..15: mol_type = other DNA
ttgaaacagttgtgt

SEQ ID NO: 8349 - DNA, 15 bp, synthetic construct
  source 1..15: mol_type = other DNA
gctattaagacacct

SEQ ID NO: 8350 - DNA, 15 bp, synthetic construct
  source 1..15: mol_type = other DNA
aggctaatcttggca

SEQ ID NO: 8351 - DNA, 15 bp, synthetic construct
  source 1..15: mol_type = other DNA
tatcacctgcaggac

SEQ ID NO: 8352 - DNA, 15 bp, synthetic construct
  source 1..15: mol_type = other DNA
attcttgtgtggttt

SEQ ID NO: 8353 - DNA, 15 bp, synthetic construct
  source 1..15: mol_type = other DNA
ggaaagctctcactt

SEQ ID NO: 8354 - DNA, 15 bp, synthetic construct
  source 1..15: mol_type = other DNA
atgctattttcctgt

SEQ ID NO: 8355 - DNA, 15 bp, synthetic construct
  source 1..15: mol_type = other DNA
gggttaaggaaaata

SEQ ID NO: 8356 - DNA, 15 bp, synthetic construct
  source 1..15: mol_type = other DNA
gtggaagtgtatgtt

SEQ ID NO: 8357 - DNA, 15 bp, synthetic construct
  source 1..15: mol_type = other DNA
taccactcaaacatg

SEQ ID NO: 8358 - DNA, 15 bp, synthetic construct
  source 1..15: mol_type = other DNA
tgggctttctatttt

SEQ ID NO: 8359 - DNA, 15 bp, synthetic construct
  source 1..15: mol_type = other DNA
acatgtgggcacaga

SEQ ID NO: 8360 - DNA, 15 bp, synthetic construct
  source 1..15: mol_type = other DNA
gttgaaaatatgtca

SEQ ID NO: 8361 - DNA, 15 bp, synthetic construct
  source 1..15: mol_type = other DNA
atgtgactctgagca

SEQ ID NO: 8362 - DNA, 15 bp, synthetic construct
  source 1..15: mol_type = other DNA
acagagccaatgagc

SEQ ID NO: 8363 - DNA, 15 bp, synthetic construct
  source 1..15: mol_type = other DNA
aagctgtttcactgc

SEQ ID NO: 8364 - DNA, 15 bp, synthetic construct
  source 1..15: mol_type = other DNA
aagggtaacttgtga

SEQ ID NO: 8365 - DNA, 15 bp, synthetic construct
  source 1..15: mol_type = other DNA
aggtgcaaagtaaat

SEQ ID NO: 8366 - DNA, 15 bp, synthetic construct
  source 1..15: mol_type = other DNA
tgtttcaaaggtgtc

SEQ ID NO: 8367 - DNA, 15 bp, synthetic construct
  source 1..15: mol_type = other DNA
agaaaggtaatctcc

SEQ ID NO: 8368 - DNA, 15 bp, synthetic construct
  source 1..15: mol_type = other DNA
aaagacaatatgcct

SEQ ID NO: 8369 - DNA, 15 bp, synthetic construct
  source 1..15: mol_type = other DNA
ttggcgggagcctat

SEQ ID NO: 8370 - DNA, 15 bp, synthetic construct
  source 1..15: mol_type = other DNA
gcggtaaacagcatg

SEQ ID NO: 8371 - DNA, 15 bp, synthetic construct
  source 1..15: mol_type = other DNA
tccggaatgattgct

SEQ ID NO: 8372 - DNA, 15 bp, synthetic construct
  source 1..15: mol_type = other DNA
atcaaactccacgtt

SEQ ID NO: 8373 - DNA, 15 bp, synthetic construct
  source 1..15: mol_type = other DNA
gcaacttccctgagg

SEQ ID NO: 8374 - DNA, 15 bp, synthetic construct
  source 1..15: mol_type = other DNA
ttcaaactaattagc

SEQ ID NO: 8375 - DNA, 15 bp, synthetic construct
  source 1..15: mol_type = other DNA
taaacttgactctgg

SEQ ID NO: 8376 - DNA, 15 bp, synthetic construct
  source 1..15: mol_type = other DNA
cccagtgaaagtgaa

SEQ ID NO: 8377 - DNA, 15 bp, synthetic construct
  source 1..15: mol_type = other DNA
gctcaagggaggacc

SEQ ID NO: 8378 - DNA, 15 bp, synthetic construct
  source 1..15: mol_type = other DNA
gtgaaggtcctttgt

SEQ ID NO: 8379 - DNA, 15 bp, synthetic construct
  source 1..15: mol_type = other DNA
tcactgtggctttgt

SEQ ID NO: 8380 - DNA, 15 bp, synthetic construct
  source 1..15: mol_type = other DNA
agggacaaaggcatt

SEQ ID NO: 8381 - DNA, 15 bp, synthetic construct
  source 1..15: mol_type = other DNA
actatttggatgttt

SEQ ID NO: 8382 - DNA, 15 bp, synthetic construct
  source 1..15: mol_type = other DNA
gactgtgcaatttga

SEQ ID NO: 8383 - DNA, 15 bp, synthetic construct
  source 1..15: mol_type = other DNA
tctgtcaatgtgata

SEQ ID NO: 8384 - DNA, 15 bp, synthetic construct
  source 1..15: mol_type = other DNA
tgccttgactaaatg

SEQ ID NO: 8385 - DNA, 15 bp, synthetic construct
  source 1..15: mol_type = other DNA
atgcctcagccttac

SEQ ID NO: 8386 - DNA, 15 bp, synthetic construct
  source 1..15: mol_type = other DNA
tgaaggaagctttga

SEQ ID NO: 8387 - DNA, 15 bp, synthetic construct
  source 1..15: mol_type = other DNA
gtgttgaaattccgt

SEQ ID NO: 8388 - DNA, 15 bp, synthetic construct
  source 1..15: mol_type = other DNA
agagatgaagggtct

SEQ ID NO: 8389 - DNA, 15 bp, synthetic construct
  source 1..15: mol_type = other DNA
aatcagctcagcgaa

SEQ ID NO: 8390 - DNA, 15 bp, synthetic construct
  source 1..15: mol_type = other DNA
gagatatcaaagtac

SEQ ID NO: 8391 - DNA, 15 bp, synthetic construct
  source 1..15: mol_type = other DNA
ccctcgcttcttaca

SEQ ID NO: 8392 - DNA, 15 bp, synthetic construct
  source 1..15: mol_type = other DNA
gaaactccatttacg

SEQ ID NO: 8393 - DNA, 15 bp, synthetic construct
  source 1..15: mol_type = other DNA
tctggatttgaaccc

SEQ ID NO: 8394 - DNA, 15 bp, synthetic construct
  source 1..15: mol_type = other DNA
accatgttttctggg

SEQ ID NO: 8395 - DNA, 15 bp, synthetic construct
  source 1..15: mol_type = other DNA
gtgtatgtctaccag

SEQ ID NO: 8396 - DNA, 15 bp, synthetic construct
  source 1..15: mol_type = other DNA
ttgcatgaaatttcg

SEQ ID NO: 8397 - DNA, 15 bp, synthetic construct
  source 1..15: mol_type = other DNA
atctctccagggaat

SEQ ID NO: 8398 - DNA, 15 bp, synthetic construct
  source 1..15: mol_type = other DNA
atggccaatgggaca

SEQ ID NO: 8399 - DNA, 15 bp, synthetic construct
  source 1..15: mol_type = other DNA
tacagaagatggctg

SEQ ID NO: 8400 - DNA, 15 bp, synthetic construct
  source 1..15: mol_type = other DNA
actgcaaaaatatta

SEQ ID NO: 8401 - DNA, 15 bp, synthetic construct
  source 1..15: mol_type = other DNA
tatttttagtggcta

SEQ ID NO: 8402 - DNA, 15 bp, synthetic construct
  source 1..15: mol_type = other DNA
agcctgccttcatat

SEQ ID NO: 8403 - DNA, 15 bp, synthetic construct
  source 1..15: mol_type = other DNA
tcacttctctacact

SEQ ID NO: 8404 - DNA, 15 bp, synthetic construct
  source 1..15: mol_type = other DNA
tttccatcacagagc

SEQ ID NO: 8405 - DNA, 15 bp, synthetic construct
  source 1..15: mol_type = other DNA
tcagtggaaagagac

SEQ ID NO: 8406 - DNA, 15 bp, synthetic construct
  source 1..15: mol_type = other DNA
tatctgttaatgtct

SEQ ID NO: 8407 - DNA, 15 bp, synthetic construct
  source 1..15: mol_type = other DNA
aactattcaaatcag

SEQ ID NO: 8408 - DNA, 15 bp, synthetic construct
  source 1..15: mol_type = other DNA
aatgttaggttctga

SEQ ID NO: 8409 - DNA, 15 bp, synthetic construct
  source 1..15: mol_type = other DNA
acaggtgcgtccgat

SEQ ID NO: 8410 - DNA, 15 bp, synthetic construct
  source 1..15: mol_type = other DNA
aacttctccataacg

SEQ ID NO: 8411 - DNA, 15 bp, synthetic construct
  source 1..15: mol_type = other DNA
acaggtgcgtccgat

SEQ ID NO: 8412 - DNA, 15 bp, synthetic construct
  source 1..15: mol_type = other DNA
aacttctccataacg

SEQ ID NO: 8413 - DNA, 15 bp, synthetic construct
  source 1..15: mol_type = other DNA
aattttcctctacgt

SEQ ID NO: 8414 - DNA, 15 bp, synthetic construct
  source 1..15: mol_type = other DNA
aaacaaacaggctac

SEQ ID NO: 8415 - DNA, 15 bp, synthetic construct
  source 1..15: mol_type = other DNA
ttgaacttaaaaata

SEQ ID NO: 8416 - DNA, 15 bp, synthetic construct
  source 1..15: mol_type = other DNA
cagcccacaagaaag

SEQ ID NO: 8417 - DNA, 15 bp, synthetic construct
  source 1..15: mol_type = other DNA
tgcacaaagtaaaat

SEQ ID NO: 8418 - DNA, 15 bp, synthetic construct
  source 1..15: mol_type = other DNA
agaatgaacagtgct

SEQ ID NO: 8419 - DNA, 15 bp, synthetic construct
  source 1..15: mol_type = other DNA
tgtggactatttcag

SEQ ID NO: 8420 - DNA, 15 bp, synthetic construct
  source 1..15: mol_type = other DNA
aggtgctaatcctaa

SEQ ID NO: 8421 - DNA, 15 bp, synthetic construct
  source 1..15: mol_type = other DNA
tgtggactatttcag

SEQ ID NO: 8422 - DNA, 15 bp, synthetic construct
  source 1..15: mol_type = other DNA
aggtgctaatcctaa

SEQ ID NO: 8423 - DNA, 15 bp, synthetic construct
  source 1..15: mol_type = other DNA
agaatcttccttggc

SEQ ID NO: 8424 - DNA, 15 bp, synthetic construct
  source 1..15: mol_type = other DNA
ttgtaccaacaacct

SEQ ID NO: 8425 - DNA, 15 bp, synthetic construct
  source 1..15: mol_type = other DNA
tgacctgattttgct

SEQ ID NO: 8426 - DNA, 15 bp, synthetic construct
  source 1..15: mol_type = other DNA
cctcttggctttgtc

SEQ ID NO: 8427 - DNA, 15 bp, synthetic construct
  source 1..15: mol_type = other DNA
tccatgttcgggttt

SEQ ID NO: 8428 - DNA, 15 bp, synthetic construct
  source 1..15: mol_type = other DNA
tactgctgacatgat

SEQ ID NO: 8429 - DNA, 15 bp, synthetic construct
  source 1..15: mol_type = other DNA
gttttatgtgctttt

SEQ ID NO: 8430 - DNA, 15 bp, synthetic construct
  source 1..15: mol_type = other DNA
tcagggaaaagagtg

SEQ ID NO: 8431 - DNA, 15 bp, synthetic construct
  source 1..15: mol_type = other DNA
cagccatcttatcta

SEQ ID NO: 8432 - DNA, 15 bp, synthetic construct
  source 1..15: mol_type = other DNA
acacttccattatga

SEQ ID NO: 8433 - DNA, 15 bp, synthetic construct
  source 1..15: mol_type = other DNA
ggcccggatatactg

SEQ ID NO: 8434 - DNA, 15 bp, synthetic construct
  source 1..15: mol_type = other DNA
ccaaaatgtaaactg

SEQ ID NO: 8435 - DNA, 15 bp, synthetic construct
  source 1..15: mol_type = other DNA
aaaacccagctacaa

SEQ ID NO: 8436 - DNA, 15 bp, synthetic construct
  source 1..15: mol_type = other DNA
ggcaaatttgtttta

SEQ ID NO: 8437 - DNA, 15 bp, synthetic construct
  source 1..15: mol_type = other DNA
ccttacttgttcaca

SEQ ID NO: 8438 - DNA, 15 bp, synthetic construct
  source 1..15: mol_type = other DNA
gtcttatgagaagga

SEQ ID NO: 8439 - DNA, 15 bp, synthetic construct
  source 1..15: mol_type = other DNA
acagctgtaattctt

SEQ ID NO: 8440 - DNA, 15 bp, synthetic construct
  source 1..15: mol_type = other DNA
ttttcttaatactgt

SEQ ID NO: 8441 - DNA, 15 bp, synthetic construct
  source 1..15: mol_type = other DNA
tcctttcccaaaaaa

SEQ ID NO: 8442 - DNA, 15 bp, synthetic construct
  source 1..15: mol_type = other DNA
ttagcaggcctttta

SEQ ID NO: 8443 - DNA, 15 bp, synthetic construct
  source 1..15: mol_type = other DNA
gacttaacgctggta

SEQ ID NO: 8444 - DNA, 15 bp, synthetic construct
  source 1..15: mol_type = other DNA
tggtcaggaaaataa

SEQ ID NO: 8445 - DNA, 15 bp, synthetic construct
  source 1..15: mol_type = other DNA
ctacccttgcagagc

SEQ ID NO: 8446 - DNA, 15 bp, synthetic construct
  source 1..15: mol_type = other DNA
tcgcatataatcaca

SEQ ID NO: 8447 - DNA, 15 bp, synthetic construct
  source 1..15: mol_type = other DNA
ctttatccatgtccg

SEQ ID NO: 8448 - DNA, 15 bp, synthetic construct
  source 1..15: mol_type = other DNA
agaagcaatgttact

SEQ ID NO: 8449 - DNA, 15 bp, synthetic construct
  source 1..15: mol_type = other DNA
gctacactgtggctg

SEQ ID NO: 8450 - DNA, 15 bp, synthetic construct
  source 1..15: mol_type = other DNA
aatcataccaaatca

SEQ ID NO: 8451 - DNA, 15 bp, synthetic construct
  source 1..15: mol_type = other DNA
agttgctatttgctt

SEQ ID NO: 8452 - DNA, 15 bp, synthetic construct
  source 1..15: mol_type = other DNA
agaatccacttctca

SEQ ID NO: 8453 - DNA, 15 bp, synthetic construct
  source 1..15: mol_type = other DNA
ttggataatggtaga

SEQ ID NO: 8454 - DNA, 15 bp, synthetic construct
  source 1..15: mol_type = other DNA
ttgtctcatctggtt

SEQ ID NO: 8455 - DNA, 15 bp, synthetic construct
  source 1..15: mol_type = other DNA
ttggtacccaacaca

SEQ ID NO: 8456 - DNA, 15 bp, synthetic construct
  source 1..15: mol_type = other DNA
caaaagtacttgctg

SEQ ID NO: 8457 - DNA, 15 bp, synthetic construct
  source 1..15: mol_type = other DNA
ttggtacccaacaca

SEQ ID NO: 8458 - DNA, 15 bp, synthetic construct
  source 1..15: mol_type = other DNA
caaaagtacttgctg

SEQ ID NO: 8459 - DNA, 15 bp, synthetic construct
  source 1..15: mol_type = other DNA
ggtcctgctagacta

SEQ ID NO: 8460 - DNA, 15 bp, synthetic construct
  source 1..15: mol_type = other DNA
tactgacttggttga

SEQ ID NO: 8461 - DNA, 15 bp, synthetic construct
  source 1..15: mol_type = other DNA
attaattgcaaagca

SEQ ID NO: 8462 - DNA, 15 bp, synthetic construct
  source 1..15: mol_type = other DNA
agttctacaaaggga

SEQ ID NO: 8463 - DNA, 15 bp, synthetic construct
  source 1..15: mol_type = other DNA
ttgtcaccagaagtt

SEQ ID NO: 8464 - DNA, 15 bp, synthetic construct
  source 1..15: mol_type = other DNA
aagccaaatccacaa

SEQ ID NO: 8465 - DNA, 15 bp, synthetic construct
  source 1..15: mol_type = other DNA
atttttgatctgctg

SEQ ID NO: 8466 - DNA, 15 bp, synthetic construct
  source 1..15: mol_type = other DNA
attccttcttttggt

SEQ ID NO: 8467 - DNA, 15 bp, synthetic construct
  source 1..15: mol_type = other DNA
tagttgagagaatta

SEQ ID NO: 8468 - DNA, 15 bp, synthetic construct
  source 1..15: mol_type = other DNA
tgatatcatgacttt

SEQ ID NO: 8469 - DNA, 15 bp, synthetic construct
  source 1..15: mol_type = other DNA
agaccactctcatgg

SEQ ID NO: 8470 - DNA, 15 bp, synthetic construct
  source 1..15: mol_type = other DNA
tgaacaaagccacta

SEQ ID NO: 8471 - DNA, 15 bp, synthetic construct
  source 1..15: mol_type = other DNA
tgaagcatcataacg

SEQ ID NO: 8472 - DNA, 15 bp, synthetic construct
  source 1..15: mol_type = other DNA
aacagagcatgtgac

SEQ ID NO: 8473 - DNA, 15 bp, synthetic construct
  source 1..15: mol_type = other DNA
agtcatcatagctga

SEQ ID NO: 8474 - DNA, 15 bp, synthetic construct
  source 1..15: mol_type = other DNA
ccgtaaataatgctt

SEQ ID NO: 8475 - DNA, 15 bp, synthetic construct
  source 1..15: mol_type = other DNA
cagattgatgtgaag

SEQ ID NO: 8476 - DNA, 15 bp, synthetic construct
  source 1..15: mol_type = other DNA
catctgttgaacaca

SEQ ID NO: 8477 - DNA, 15 bp, synthetic construct
  source 1..15: mol_type = other DNA
accataagaacactg

SEQ ID NO: 8478 - DNA, 15 bp, synthetic construct
  source 1..15: mol_type = other DNA
ggtaacacatctgtc

SEQ ID NO: 8479 - DNA, 15 bp, synthetic construct
  source 1..15: mol_type = other DNA
ttcaatggaagctct

SEQ ID NO: 8480 - DNA, 15 bp, synthetic construct
  source 1..15: mol_type = other DNA
tagggagttctactt

SEQ ID NO: 8481 - DNA, 15 bp, synthetic construct
  source 1..15: mol_type = other DNA
gtagctacttgtgtc

SEQ ID NO: 8482 - DNA, 15 bp, synthetic construct
  source 1..15: mol_type = other DNA
tgatactagctttct

SEQ ID NO: 8483 - DNA, 15 bp, synthetic construct
  source 1..15: mol_type = other DNA
ttcttttgggttggg

SEQ ID NO: 8484 - DNA, 15 bp, synthetic construct
  source 1..15: mol_type = other DNA
aggcgattcaagatg

SEQ ID NO: 8485 - DNA, 15 bp, synthetic construct
  source 1..15: mol_type = other DNA
aagagctcgtccagg

SEQ ID NO: 8486 - DNA, 15 bp, synthetic construct
  source 1..15: mol_type = other DNA
atcgcgagtcacaca

SEQ ID NO: 8487 - DNA, 15 bp, synthetic construct
  source 1..15: mol_type = other DNA
cagcaagatcttccc

SEQ ID NO: 8488 - DNA, 15 bp, synthetic construct
  source 1..15: mol_type = other DNA
gaggcccagcatgtt

SEQ ID NO: 8489 - DNA, 15 bp, synthetic construct
  source 1..15: mol_type = other DNA
acgtgattagttgat

SEQ ID NO: 8490 - DNA, 15 bp, synthetic construct
  source 1..15: mol_type = other DNA
ggaatgaaacaggtt

SEQ ID NO: 8491 - DNA, 15 bp, synthetic construct
  source 1..15: mol_type = other DNA
acattgctcaagccc

SEQ ID NO: 8492 - DNA, 15 bp, synthetic construct
  source 1..15: mol_type = other DNA
ttggtgcgcgtgttc

SEQ ID NO: 8493 - DNA, 15 bp, synthetic construct
  source 1..15: mol_type = other DNA
cgacccagagagtag

SEQ ID NO: 8494 - DNA, 15 bp, synthetic construct
  source 1..15: mol_type = other DNA
gtaggaagggtgcag

SEQ ID NO: 8495 - DNA, 15 bp, synthetic construct
  source 1..15: mol_type = other DNA
cgacccagagagtag

SEQ ID NO: 8496 - DNA, 15 bp, synthetic construct
  source 1..15: mol_type = other DNA
gtaggaagggtgcag

SEQ ID NO: 8497 - DNA, 15 bp, synthetic construct
  source 1..15: mol_type = other DNA
tctgccaccacccag

SEQ ID NO: 8498 - DNA, 15 bp, synthetic construct
  source 1..15: mol_type = other DNA
gaccctgcagctgtg

SEQ ID NO: 8499 - DNA, 15 bp, synthetic construct
  source 1..15: mol_type = other DNA
caaacgtgtttatca

SEQ ID NO: 8500 - DNA, 15 bp, synthetic construct
  source 1..15: mol_type = other DNA
agtacaccagcatcg

SEQ ID NO: 8501 - DNA, 15 bp, synthetic construct
  source 1..15: mol_type = other DNA
tggccttgatggcat

SEQ ID NO: 8502 - DNA, 15 bp, synthetic construct
  source 1..15: mol_type = other DNA
gacactgaaggatgt

SEQ ID NO: 8503 - DNA, 15 bp, synthetic construct
  source 1..15: mol_type = other DNA
gcaccaatctccctg

SEQ ID NO: 8504 - DNA, 15 bp, synthetic construct
  source 1..15: mol_type = other DNA
atgccctggaggtca

SEQ ID NO: 8505 - DNA, 15 bp, synthetic construct
  source 1..15: mol_type = other DNA
ggtccagcgagacag

SEQ ID NO: 8506 - DNA, 15 bp, synthetic construct
  source 1..15: mol_type = other DNA
atccagcctcagaga

SEQ ID NO: 8507 - DNA, 15 bp, synthetic construct
  source 1..15: mol_type = other DNA
aggctggatcttccc

SEQ ID NO: 8508 - DNA, 15 bp, synthetic construct
  source 1..15: mol_type = other DNA
cgattgcggctgaat

SEQ ID NO: 8509 - DNA, 15 bp, synthetic construct
  source 1..15: mol_type = other DNA
cctctgcacagcgtt

SEQ ID NO: 8510 - DNA, 15 bp, synthetic construct
  source 1..15: mol_type = other DNA
agtggcctttgtcca

SEQ ID NO: 8511 - DNA, 15 bp, synthetic construct
  source 1..15: mol_type = other DNA
tcctgcctctctcgc

SEQ ID NO: 8512 - DNA, 15 bp, synthetic construct
  source 1..15: mol_type = other DNA
tggtcccatccagca

SEQ ID NO: 8513 - DNA, 15 bp, synthetic construct
  source 1..15: mol_type = other DNA
gctctgcaccatccc

SEQ ID NO: 8514 - DNA, 15 bp, synthetic construct
  source 1..15: mol_type = other DNA
ggttatgaggacctg

SEQ ID NO: 8515 - DNA, 15 bp, synthetic construct
  source 1..15: mol_type = other DNA
gaaggtctggtgtac

SEQ ID NO: 8516 - DNA, 15 bp, synthetic construct
  source 1..15: mol_type = other DNA
ataaaaggattgcag

SEQ ID NO: 8517 - DNA, 15 bp, synthetic construct
  source 1..15: mol_type = other DNA
gtttcaggttgaatg

SEQ ID NO: 8518 - DNA, 15 bp, synthetic construct
  source 1..15: mol_type = other DNA
gtagtcttgtttgca

SEQ ID NO: 8519 - DNA, 15 bp, synthetic construct
  source 1..15: mol_type = other DNA
taaaatcataccagc

SEQ ID NO: 8520 - DNA, 15 bp, synthetic construct
  source 1..15: mol_type = other DNA
ctttgaaatcctagt

SEQ ID NO: 8521 - DNA, 15 bp, synthetic construct
  source 1..15: mol_type = other DNA
gtgatattctcagtg

SEQ ID NO: 8522 - DNA, 15 bp, synthetic construct
  source 1..15: mol_type = other DNA
ttcagtcttttgatg

SEQ ID NO: 8523 - DNA, 15 bp, synthetic construct
  source 1..15: mol_type = other DNA
gtcagcaaggtatat

SEQ ID NO: 8524 - DNA, 15 bp, synthetic construct
  source 1..15: mol_type = other DNA
tcactgttggaggat

SEQ ID NO: 8525 - DNA, 15 bp, synthetic construct
  source 1..15: mol_type = other DNA
gcataaccttcatgt

SEQ ID NO: 8526 - DNA, 15 bp, synthetic construct
  source 1..15: mol_type = other DNA
ctccgggtctccatc

SEQ ID NO: 8527 - DNA, 15 bp, synthetic construct
  source 1..15: mol_type = other DNA
aatggataccaaggt

SEQ ID NO: 8528 - DNA, 15 bp, synthetic construct
  source 1..15: mol_type = other DNA
accataatccccatt

SEQ ID NO: 8529 - DNA, 15 bp, synthetic construct
  source 1..15: mol_type = other DNA
ctccaggtaaagatc

SEQ ID NO: 8530 - DNA, 15 bp, synthetic construct
  source 1..15: mol_type = other DNA
cttttctcttcttgc

SEQ ID NO: 8531 - DNA, 15 bp, synthetic construct
  source 1..15: mol_type = other DNA
ggaggaagaaatgga

SEQ ID NO: 8532 - DNA, 15 bp, synthetic construct
  source 1..15: mol_type = other DNA
ctttatcctctgcgt

SEQ ID NO: 8533 - DNA, 15 bp, synthetic construct
  source 1..15: mol_type = other DNA
gcagacatgcaagcc

SEQ ID NO: 8534 - DNA, 15 bp, synthetic construct
  source 1..15: mol_type = other DNA
gtacacgacgatgtc

SEQ ID NO: 8535 - DNA, 15 bp, synthetic construct
  source 1..15: mol_type = other DNA
ggatgcagctgtagg

SEQ ID NO: 8536 - DNA, 15 bp, synthetic construct
  source 1..15: mol_type = other DNA
tgtcagcttcagtca

SEQ ID NO: 8537 - DNA, 15 bp, synthetic construct
  source 1..15: mol_type = other DNA
actaaactgaaacaa

SEQ ID NO: 8538 - DNA, 15 bp, synthetic construct
  source 1..15: mol_type = other DNA
cctttttcctcgatc

SEQ ID NO: 8539 - DNA, 15 bp, synthetic construct
  source 1..15: mol_type = other DNA
agtgtaggcatctcc

SEQ ID NO: 8540 - DNA, 15 bp, synthetic construct
  source 1..15: mol_type = other DNA
ccaccaattcatagg

SEQ ID NO: 8541 - DNA, 15 bp, synthetic construct
  source 1..15: mol_type = other DNA
agacaaacttgaatc

SEQ ID NO: 8542 - DNA, 15 bp, synthetic construct
  source 1..15: mol_type = other DNA
cacaaccgatagacc

SEQ ID NO: 8543 - DNA, 15 bp, synthetic construct
  source 1..15: mol_type = other DNA
agatttggaacaggt

SEQ ID NO: 8544 - DNA, 15 bp, synthetic construct
  source 1..15: mol_type = other DNA
cttagacaagtgttg

SEQ ID NO: 8545 - DNA, 15 bp, synthetic construct
  source 1..15: mol_type = other DNA
ttggaacgttgcttt

SEQ ID NO: 8546 - DNA, 15 bp, synthetic construct
  source 1..15: mol_type = other DNA
ctctttggtcttcac

SEQ ID NO: 8547 - DNA, 15 bp, synthetic construct
  source 1..15: mol_type = other DNA
tatctggttggtctc

SEQ ID NO: 8548 - DNA, 15 bp, synthetic construct
  source 1..15: mol_type = other DNA
agagattcccctaca

SEQ ID NO: 8549 - DNA, 15 bp, synthetic construct
  source 1..15: mol_type = other DNA
ttggaatgatgactg

SEQ ID NO: 8550 - DNA, 15 bp, synthetic construct
  source 1..15: mol_type = other DNA
ggatacgctcaatgt

SEQ ID NO: 8551 - DNA, 15 bp, synthetic construct
  source 1..15: mol_type = other DNA
atgaaatctgcaagc

SEQ ID NO: 8552 - DNA, 15 bp, synthetic construct
  source 1..15: mol_type = other DNA
ctacctgtgatttta

SEQ ID NO: 8553 - DNA, 15 bp, synthetic construct
  source 1..15: mol_type = other DNA
actctgtacctttct

SEQ ID NO: 8554 - DNA, 15 bp, synthetic construct
  source 1..15: mol_type = other DNA
aagcatcagcagagg

SEQ ID NO: 8555 - DNA, 15 bp, synthetic construct
  source 1..15: mol_type = other DNA
atttacatgcatgag

SEQ ID NO: 8556 - DNA, 15 bp, synthetic construct
  source 1..15: mol_type = other DNA
gccaatgactgtgag

SEQ ID NO: 8557 - DNA, 15 bp, synthetic construct
  source 1..15: mol_type = other DNA
tctaagtgcaggatc

SEQ ID NO: 8558 - DNA, 15 bp, synthetic construct
  source 1..15: mol_type = other DNA
gactgacagcattag

SEQ ID NO: 8559 - DNA, 15 bp, synthetic construct
  source 1..15: mol_type = other DNA
aagctcttcttccga

SEQ ID NO: 8560 - DNA, 15 bp, synthetic construct
  source 1..15: mol_type = other DNA
actcaatgacatcac

SEQ ID NO: 8561 - DNA, 15 bp, synthetic construct
  source 1..15: mol_type = other DNA
ttgtgaccaatcgta

SEQ ID NO: 8562 - DNA, 15 bp, synthetic construct
  source 1..15: mol_type = other DNA
gtacattaaatgtgg

SEQ ID NO: 8563 - DNA, 15 bp, synthetic construct
  source 1..15: mol_type = other DNA
cgaccacttggtgtt

SEQ ID NO: 8564 - DNA, 15 bp, synthetic construct
  source 1..15: mol_type = other DNA
cactcatgcactttg

SEQ ID NO: 8565 - DNA, 15 bp, synthetic construct
  source 1..15: mol_type = other DNA
ccgctatgtcatcaa

SEQ ID NO: 8566 - DNA, 15 bp, synthetic construct
  source 1..15: mol_type = other DNA
cataccggcatctaa

SEQ ID NO: 8567 - DNA, 15 bp, synthetic construct
  source 1..15: mol_type = other DNA
tggcttcgtaagcgg

SEQ ID NO: 8568 - DNA, 15 bp, synthetic construct
  source 1..15: mol_type = other DNA
cttgccatgtcatgt

SEQ ID NO: 8569 - DNA, 15 bp, synthetic construct
  source 1..15: mol_type = other DNA
ttggctccttacttt

SEQ ID NO: 8570 - DNA, 15 bp, synthetic construct
  source 1..15: mol_type = other DNA
tcctgtctgctggtt

SEQ ID NO: 8571 - DNA, 15 bp, synthetic construct
  source 1..15: mol_type = other DNA
atctcttcccatagg

SEQ ID NO: 8572 - DNA, 15 bp, synthetic construct
  source 1..15: mol_type = other DNA
tctatccgtccgtga

SEQ ID NO: 8573 - DNA, 15 bp, synthetic construct
  source 1..15: mol_type = other DNA
catccaggatgacga

SEQ ID NO: 8574 - DNA, 15 bp, synthetic construct
  source 1..15: mol_type = other DNA
cagcttacgttgtcc

SEQ ID NO: 8575 - DNA, 15 bp, synthetic construct
  source 1..15: mol_type = other DNA
cccaacatggcttgt

SEQ ID NO: 8576 - DNA, 15 bp, synthetic construct
  source 1..15: mol_type = other DNA
tggcgacacaaatcc

SEQ ID NO: 8577 - DNA, 15 bp, synthetic construct
  source 1..15: mol_type = other DNA
tcacagggtacacat

SEQ ID NO: 8578 - DNA, 15 bp, synthetic construct
  source 1..15: mol_type = other DNA
aaacttccattttct

SEQ ID NO: 8579 - DNA, 15 bp, synthetic construct
  source 1..15: mol_type = other DNA
tgtgagagtacgaaa

SEQ ID NO: 8580 - DNA, 15 bp, synthetic construct
  source 1..15: mol_type = other DNA
cgtatacattcagta

SEQ ID NO: 8581 - DNA, 15 bp, synthetic construct
  source 1..15: mol_type = other DNA
gattttctaagtcac

SEQ ID NO: 8582 - DNA, 15 bp, synthetic construct
  source 1..15: mol_type = other DNA
taactgcgttctttc

SEQ ID NO: 8583 - DNA, 15 bp, synthetic construct
  source 1..15: mol_type = other DNA
cagacaaccaacaca

SEQ ID NO: 8584 - DNA, 15 bp, synthetic construct
  source 1..15: mol_type = other DNA
ttcaggattttatgg

SEQ ID NO: 8585 - DNA, 15 bp, synthetic construct
  source 1..15: mol_type = other DNA
aaactcaagggactg

SEQ ID NO: 8586 - DNA, 15 bp, synthetic construct
  source 1..15: mol_type = other DNA
ctgtggaacttgtgc

SEQ ID NO: 8587 - DNA, 15 bp, synthetic construct
  source 1..15: mol_type = other DNA
actcaacccaccaac

SEQ ID NO: 8588 - DNA, 15 bp, synthetic construct
  source 1..15: mol_type = other DNA
ttttatgtccctcat

SEQ ID NO: 8589 - DNA, 15 bp, synthetic construct
  source 1..15: mol_type = other DNA
tatgtcctggagaag

SEQ ID NO: 8590 - DNA, 15 bp, synthetic construct
  source 1..15: mol_type = other DNA
ttcaagccgaagtgg

SEQ ID NO: 8591 - DNA, 15 bp, synthetic construct
  source 1..15: mol_type = other DNA
gtgagcattcctttt

SEQ ID NO: 8592 - DNA, 15 bp, synthetic construct
  source 1..15: mol_type = other DNA
gctgtgtgtacccaa

SEQ ID NO: 8593 - DNA, 15 bp, synthetic construct
  source 1..15: mol_type = other DNA
tgtactacaagaata

SEQ ID NO: 8594 - DNA, 15 bp, synthetic construct
  source 1..15: mol_type = other DNA
cttatcgatgtctct

SEQ ID NO: 8595 - DNA, 15 bp, synthetic construct
  source 1..15: mol_type = other DNA
aaagcaaacacttca

SEQ ID NO: 8596 - DNA, 15 bp, synthetic construct
  source 1..15: mol_type = other DNA
caatagtctttgagt

SEQ ID NO: 8597 - DNA, 15 bp, synthetic construct
  source 1..15: mol_type = other DNA
atcttgagattttca

SEQ ID NO: 8598 - DNA, 15 bp, synthetic construct
  source 1..15: mol_type = other DNA
agtttgaaggttgcg

SEQ ID NO: 8599 - DNA, 15 bp, synthetic construct
  source 1..15: mol_type = other DNA
aggtcaccccttgcg

SEQ ID NO: 8600 - DNA, 15 bp, synthetic construct
  source 1..15: mol_type = other DNA
tcagtggaaaaatgc

SEQ ID NO: 8601 - DNA, 15 bp, synthetic construct
  source 1..15: mol_type = other DNA
ctgctggtcgtacag

SEQ ID NO: 8602 - DNA, 15 bp, synthetic construct
  source 1..15: mol_type = other DNA
ccgctggatcgactg

SEQ ID NO: 8603 - DNA, 15 bp, synthetic construct
  source 1..15: mol_type = other DNA
cctccaggcgttcgg

SEQ ID NO: 8604 - DNA, 15 bp, synthetic construct
  source 1..15: mol_type = other DNA
cggcctgttcaagac

SEQ ID NO: 8605 - DNA, 15 bp, synthetic construct
  source 1..15: mol_type = other DNA
tgcatgcgctcgtgc

SEQ ID NO: 8606 - DNA, 15 bp, synthetic construct
  source 1..15: mol_type = other DNA
gaggtctacgggcat

SEQ ID NO: 8607 - DNA, 15 bp, synthetic construct
  source 1..15: mol_type = other DNA
cggatgatggtattg

SEQ ID NO: 8608 - DNA, 15 bp, synthetic construct
  source 1..15: mol_type = other DNA
cccgctgtccgatgg

SEQ ID NO: 8609 - DNA, 15 bp, synthetic construct
  source 1..15: mol_type = other DNA
ctattgctggacatg

SEQ ID NO: 8610 - DNA, 15 bp, synthetic construct
  source 1..15: mol_type = other DNA
ggccttgatctaggg

SEQ ID NO: 8611 - DNA, 15 bp, synthetic construct
  source 1..15: mol_type = other DNA
gatgataagatggca

SEQ ID NO: 8612 - DNA, 15 bp, synthetic construct
  source 1..15: mol_type = other DNA
tatcctgctaaaatg

SEQ ID NO: 8613 - DNA, 15 bp, synthetic construct
  source 1..15: mol_type = other DNA
acctggtatctgaag

SEQ ID NO: 8614 - DNA, 15 bp, synthetic construct
  source 1..15: mol_type = other DNA
atcagtcctagctta

SEQ ID NO: 8615 - DNA, 15 bp, synthetic construct
  source 1..15: mol_type = other DNA
cagcatttaccactg

SEQ ID NO: 8616 - DNA, 15 bp, synthetic construct
  source 1..15: mol_type = other DNA
aagggacatgaaagc

SEQ ID NO: 8617 - DNA, 15 bp, synthetic construct
  source 1..15: mol_type = other DNA
tcccaggatttggag

SEQ ID NO: 8618 - DNA, 15 bp, synthetic construct
  source 1..15: mol_type = other DNA
aaagccaaagcagca

SEQ ID NO: 8619 - DNA, 15 bp, synthetic construct
  source 1..15: mol_type = other DNA
atggaggttgttagc

SEQ ID NO: 8620 - DNA, 15 bp, synthetic construct
  source 1..15: mol_type = other DNA
atcgagtcccactat

SEQ ID NO: 8621 - DNA, 15 bp, synthetic construct
  source 1..15: mol_type = other DNA
ataaataggtgacaa

SEQ ID NO: 8622 - DNA, 15 bp, synthetic construct
  source 1..15: mol_type = other DNA
cttattggactttgc

SEQ ID NO: 8623 - DNA, 15 bp, synthetic construct
  source 1..15: mol_type = other DNA
gaggtttggctctcc

SEQ ID NO: 8624 - DNA, 15 bp, synthetic construct
  source 1..15: mol_type = other DNA
gtttgaacgaccaag

SEQ ID NO: 8625 - DNA, 15 bp, synthetic construct
  source 1..15: mol_type = other DNA
tctattggttgccta

SEQ ID NO: 8626 - DNA, 15 bp, synthetic construct
  source 1..15: mol_type = other DNA
gagcttagagcaaca

SEQ ID NO: 8627 - DNA, 15 bp, synthetic construct
  source 1..15: mol_type = other DNA
ccaatcaaatgtgca

SEQ ID NO: 8628 - DNA, 15 bp, synthetic construct
  source 1..15: mol_type = other DNA
ctgcttgttgctgat

SEQ ID NO: 8629 - DNA, 15 bp, synthetic construct
  source 1..15: mol_type = other DNA
agagcacattgcgaa

SEQ ID NO: 8630 - DNA, 15 bp, synthetic construct
  source 1..15: mol_type = other DNA
caaactacttgactg

SEQ ID NO: 8631 - DNA, 15 bp, synthetic construct
  source 1..15: mol_type = other DNA
acttgttataaggtg

SEQ ID NO: 8632 - DNA, 15 bp, synthetic construct
  source 1..15: mol_type = other DNA
agcaactttccttaa

SEQ ID NO: 8633 - DNA, 15 bp, synthetic construct
  source 1..15: mol_type = other DNA
ctaatttcaaaacaa

SEQ ID NO: 8634 - DNA, 15 bp, synthetic construct
  source 1..15: mol_type = other DNA
tgattgttggtttcc

SEQ ID NO: 8635 - DNA, 15 bp, synthetic construct
  source 1..15: mol_type = other DNA
atttcccagaaggtc

SEQ ID NO: 8636 - DNA, 15 bp, synthetic construct
  source 1..15: mol_type = other DNA
aagatcttacttggt

SEQ ID NO: 8637 - DNA, 15 bp, synthetic construct
  source 1..15: mol_type = other DNA
cttctttccagatga

SEQ ID NO: 8638 - DNA, 15 bp, synthetic construct
  source 1..15: mol_type = other DNA
ttcatattcctccaa

SEQ ID NO: 8639 - DNA, 15 bp, synthetic construct
  source 1..15: mol_type = other DNA
caagatgaggatcaa

SEQ ID NO: 8640 - DNA, 15 bp, synthetic construct
  source 1..15: mol_type = other DNA
atccatctaggttta

SEQ ID NO: 8641 - DNA, 15 bp, synthetic construct
  source 1..15: mol_type = other DNA
tggctaaagttgtgt

SEQ ID NO: 8642 - DNA, 15 bp, synthetic construct
  source 1..15: mol_type = other DNA
cctaggtgattgaaa

SEQ ID NO: 8643 - DNA, 15 bp, synthetic construct
  source 1..15: mol_type = other DNA
ttggtcactctgaat

SEQ ID NO: 8644 - DNA, 15 bp, synthetic construct
  source 1..15: mol_type = other DNA
gagggagaatagctg

SEQ ID NO: 8645 - DNA, 15 bp, synthetic construct
  source 1..15: mol_type = other DNA
tataggactactgaa

SEQ ID NO: 8646 - DNA, 15 bp, synthetic construct
  source 1..15: mol_type = other DNA
ctcttttcctttcac

SEQ ID NO: 8647 - DNA, 15 bp, synthetic construct
  source 1..15: mol_type = other DNA
ctctagccctgccag

SEQ ID NO: 8648 - DNA, 15 bp, synthetic construct
  source 1..15: mol_type = other DNA
ttgtttgattaccca

SEQ ID NO: 8649 - DNA, 15 bp, synthetic construct
  source 1..15: mol_type = other DNA
aaatcccgtagcagc

SEQ ID NO: 8650 - DNA, 15 bp, synthetic construct
  source 1..15: mol_type = other DNA
aaacagctcctcgta

SEQ ID NO: 8651 - DNA, 15 bp, synthetic construct
  source 1..15: mol_type = other DNA
catctctggcaaatg

SEQ ID NO: 8652 - DNA, 15 bp, synthetic construct
  source 1..15: mol_type = other DNA
gaggctgttgtgaac

SEQ ID NO: 8653 - DNA, 15 bp, synthetic construct
  source 1..15: mol_type = other DNA
cattcttgctgtcca

SEQ ID NO: 8654 - DNA, 15 bp, synthetic construct
  source 1..15: mol_type = other DNA
cttcaacacaatttc

SEQ ID NO: 8655 - DNA, 15 bp, synthetic construct
  source 1..15: mol_type = other DNA
cttgttcctggttac

SEQ ID NO: 8656 - DNA, 15 bp, synthetic construct
  source 1..15: mol_type = other DNA
atcacactggagact

SEQ ID NO: 8657 - DNA, 15 bp, synthetic construct
  source 1..15: mol_type = other DNA
tatagtgaagcacat

SEQ ID NO: 8658 - DNA, 15 bp, synthetic construct
  source 1..15: mol_type = other DNA
tctgcccttgatttt

SEQ ID NO: 8659 - DNA, 15 bp, synthetic construct
  source 1..15: mol_type = other DNA
ccatttggctgaagt

SEQ ID NO: 8660 - DNA, 15 bp, synthetic construct
  source 1..15: mol_type = other DNA
ctgctctatgtcatc

SEQ ID NO: 8661 - DNA, 15 bp, synthetic construct
  source 1..15: mol_type = other DNA
ttggtagacgtgctt

SEQ ID NO: 8662 - DNA, 15 bp, synthetic construct
  source 1..15: mol_type = other DNA
tggacataatgtgtt

SEQ ID NO: 8663 - DNA, 15 bp, synthetic construct
  source 1..15: mol_type = other DNA
attcaccctgaacta

SEQ ID NO: 8664 - DNA, 15 bp, synthetic construct
  source 1..15: mol_type = other DNA
agcagctgactaact

SEQ ID NO: 8665 - DNA, 15 bp, synthetic construct
  source 1..15: mol_type = other DNA
ctccctgggtgagtc

SEQ ID NO: 8666 - DNA, 15 bp, synthetic construct
  source 1..15: mol_type = other DNA
gtattatttccagtg

SEQ ID NO: 8667 - DNA, 15 bp, synthetic construct
  source 1..15: mol_type = other DNA
aaaggttcctcatgc

SEQ ID NO: 8668 - DNA, 15 bp, synthetic construct
  source 1..15: mol_type = other DNA
cattcctctcactag

SEQ ID NO: 8669 - DNA, 15 bp, synthetic construct
  source 1..15: mol_type = other DNA
tgctcagcattggtt

SEQ ID NO: 8670 - DNA, 15 bp, synthetic construct
  source 1..15: mol_type = other DNA
atgattttacaatcc

SEQ ID NO: 8671 - DNA, 15 bp, synthetic construct
  source 1..15: mol_type = other DNA
ggaagtggaacatgc

SEQ ID NO: 8672 - DNA, 15 bp, synthetic construct
  source 1..15: mol_type = other DNA
tgaactcttgctaat

SEQ ID NO: 8673 - DNA, 15 bp, synthetic construct
  source 1..15: mol_type = other DNA
gctataccagtcttg

SEQ ID NO: 8674 - DNA, 15 bp, synthetic construct
  source 1..15: mol_type = other DNA
gttcttgctcaggtg

SEQ ID NO: 8675 - DNA, 15 bp, synthetic construct
  source 1..15: mol_type = other DNA
gcaatgtaaatggac

SEQ ID NO: 8676 - DNA, 15 bp, synthetic construct
  source 1..15: mol_type = other DNA
tttctcatgtgttct

SEQ ID NO: 8677 - DNA, 15 bp, synthetic construct
  source 1..15: mol_type = other DNA
accgtgaactggtcg

SEQ ID NO: 8678 - DNA, 15 bp, synthetic construct
  source 1..15: mol_type = other DNA
gaacgcttttcacat

SEQ ID NO: 8679 - DNA, 15 bp, synthetic construct
  source 1..15: mol_type = other DNA
ggtgacgaagctaca

SEQ ID NO: 8680 - DNA, 15 bp, synthetic construct
  source 1..15: mol_type = other DNA
gttggctgttgtagc

SEQ ID NO: 8681 - DNA, 15 bp, synthetic construct
  source 1..15: mol_type = other DNA
gacaatagtactgga

SEQ ID NO: 8682 - DNA, 15 bp, synthetic construct
  source 1..15: mol_type = other DNA
atttcatgctaagtt

SEQ ID NO: 8683 - DNA, 15 bp, synthetic construct
  source 1..15: mol_type = other DNA
ttctgactgtttgat

SEQ ID NO: 8684 - DNA, 15 bp, synthetic construct
  source 1..15: mol_type = other DNA
tcagctatagttgtg

SEQ ID NO: 8685 - DNA, 15 bp, synthetic construct
  source 1..15: mol_type = other DNA
aacatcaacttcaag

SEQ ID NO: 8686 - DNA, 15 bp, synthetic construct
  source 1..15: mol_type = other DNA
catttttgctactga

SEQ ID NO: 8687 - DNA, 15 bp, synthetic construct
  source 1..15: mol_type = other DNA
caataacccagggaa

SEQ ID NO: 8688 - DNA, 15 bp, synthetic construct
  source 1..15: mol_type = other DNA
aagatgaaaatgcct

SEQ ID NO: 8689 - DNA, 15 bp, synthetic construct
  source 1..15: mol_type = other DNA
gacccgttgagtgtg

SEQ ID NO: 8690 - DNA, 15 bp, synthetic construct
  source 1..15: mol_type = other DNA
aagagctcatgtatc

SEQ ID NO: 8691 - DNA, 15 bp, synthetic construct
  source 1..15: mol_type = other DNA
tcgccccaagaaaat

SEQ ID NO: 8692 - DNA, 15 bp, synthetic construct
  source 1..15: mol_type = other DNA
ggacaatattgacct

SEQ ID NO: 8693 - DNA, 15 bp, synthetic construct
  source 1..15: mol_type = other DNA
cttcaagtctctcct

SEQ ID NO: 8694 - DNA, 15 bp, synthetic construct
  source 1..15: mol_type = other DNA
atgagctctgtcttc

SEQ ID NO: 8695 - DNA, 15 bp, synthetic construct
  source 1..15: mol_type = other DNA
tctcaggcacaatac

SEQ ID NO: 8696 - DNA, 15 bp, synthetic construct
  source 1..15: mol_type = other DNA
atccatctcaactta

SEQ ID NO: 8697 - DNA, 15 bp, synthetic construct
  source 1..15: mol_type = other DNA
gcaatcctagaacta

SEQ ID NO: 8698 - DNA, 15 bp, synthetic construct
  source 1..15: mol_type = other DNA
tttgattgtgggcta

SEQ ID NO: 8699 - DNA, 15 bp, synthetic construct
  source 1..15: mol_type = other DNA
ttattgtgtagacca

SEQ ID NO: 8700 - DNA, 15 bp, synthetic construct
  source 1..15: mol_type = other DNA
ttattccaggtggca

SEQ ID NO: 8701 - DNA, 15 bp, synthetic construct
  source 1..15: mol_type = other DNA
gcaaagaaatctgct

SEQ ID NO: 8702 - DNA, 15 bp, synthetic construct
  source 1..15: mol_type = other DNA
actaggtgattgtgg

SEQ ID NO: 8703 - DNA, 15 bp, synthetic construct
  source 1..15: mol_type = other DNA
ttggaggttcatggc

SEQ ID NO: 8704 - DNA, 15 bp, synthetic construct
  source 1..15: mol_type = other DNA
tggagaaatctttga

SEQ ID NO: 8705 - DNA, 15 bp, synthetic construct
  source 1..15: mol_type = other DNA
gacacaatttcagca

SEQ ID NO: 8706 - DNA, 15 bp, synthetic construct
  source 1..15: mol_type = other DNA
gcagattccttgggt

SEQ ID NO: 8707 - DNA, 15 bp, synthetic construct
  source 1..15: mol_type = other DNA
tgatattgaagaaga

SEQ ID NO: 8708 - DNA, 15 bp, synthetic construct
  source 1..15: mol_type = other DNA
caatgttgtgattga

SEQ ID NO: 8709 - DNA, 15 bp, synthetic construct
  source 1..15: mol_type = other DNA
ctttgggcaagacgt

SEQ ID NO: 8710 - DNA, 15 bp, synthetic construct
  source 1..15: mol_type = other DNA
gagttgttcgctatc

SEQ ID NO: 8711 - DNA, 15 bp, synthetic construct
  source 1..15: mol_type = other DNA
atgctacatatatct

SEQ ID NO: 8712 - DNA, 15 bp, synthetic construct
  source 1..15: mol_type = other DNA
cttagcagcctctac

SEQ ID NO: 8713 - DNA, 15 bp, synthetic construct
  source 1..15: mol_type = other DNA
atctactttcttgta

SEQ ID NO: 8714 - DNA, 15 bp, synthetic construct
  source 1..15: mol_type = other DNA
ttttctcctttcttt

SEQ ID NO: 8715 - DNA, 15 bp, synthetic construct
  source 1..15: mol_type = other DNA
ggctggaagctttgt

SEQ ID NO: 8716 - DNA, 15 bp, synthetic construct
  source 1..15: mol_type = other DNA
gtgtgtgggtataac

SEQ ID NO: 8717 - DNA, 15 bp, synthetic construct
  source 1..15: mol_type = other DNA
tcacagtccagaact

SEQ ID NO: 8718 - DNA, 15 bp, synthetic construct
  source 1..15: mol_type = other DNA
agttcatcctgacct

SEQ ID NO: 8719 - DNA, 15 bp, synthetic construct
  source 1..15: mol_type = other DNA
tcttactgtgaatcc

SEQ ID NO: 8720 - DNA, 15 bp, synthetic construct
  source 1..15: mol_type = other DNA
ggtcactgctagacg

SEQ ID NO: 8721 - DNA, 15 bp, synthetic construct
  source 1..15: mol_type = other DNA
tgctcctggtatctg

SEQ ID NO: 8722 - DNA, 15 bp, synthetic construct
  source 1..15: mol_type = other DNA
acattctagaactga

SEQ ID NO: 8723 - DNA, 15 bp, synthetic construct
  source 1..15: mol_type = other DNA
atacccagaaaggca

SEQ ID NO: 8724 - DNA, 15 bp, synthetic construct
  source 1..15: mol_type = other DNA
cggagtactggtttc

SEQ ID NO: 8725 - DNA, 15 bp, synthetic construct
  source 1..15: mol_type = other DNA
ctatcataatcgaat

SEQ ID NO: 8726 - DNA, 15 bp, synthetic construct
  source 1..15: mol_type = other DNA
agtaacaatgtgctg

SEQ ID NO: 8727 - DNA, 15 bp, synthetic construct
  source 1..15: mol_type = other DNA
taactcccctcatga

SEQ ID NO: 8728 - DNA, 15 bp, synthetic construct
  source 1..15: mol_type = other DNA
gccaatctttagtct

SEQ ID NO: 8729 - DNA, 15 bp, synthetic construct
  source 1..15: mol_type = other DNA
gaaaatcgcagatag

SEQ ID NO: 8730 - DNA, 15 bp, synthetic construct
  source 1..15: mol_type = other DNA
taaatcttgtaccaa

SEQ ID NO: 8731 - DNA, 15 bp, synthetic construct
  source 1..15: mol_type = other DNA
ttctctttagggatg

SEQ ID NO: 8732 - DNA, 15 bp, synthetic construct
  source 1..15: mol_type = other DNA
gaactctctgagttg

SEQ ID NO: 8733 - DNA, 15 bp, synthetic construct
  source 1..15: mol_type = other DNA
gggtcattattgtct

SEQ ID NO: 8734 - DNA, 15 bp, synthetic construct
  source 1..15: mol_type = other DNA
ctatgagctgaccct

SEQ ID NO: 8735 - DNA, 15 bp, synthetic construct
  source 1..15: mol_type = other DNA
gaaatcttgtttgtc

SEQ ID NO: 8736 - DNA, 15 bp, synthetic construct
  source 1..15: mol_type = other DNA
aagtaaatagatttg

SEQ ID NO: 8737 - DNA, 15 bp, synthetic construct
  source 1..15: mol_type = other DNA
tcttgagaattgtgg

SEQ ID NO: 8738 - DNA, 15 bp, synthetic construct
  source 1..15: mol_type = other DNA
ggcccaagtgtcata

SEQ ID NO: 8739 - DNA, 15 bp, synthetic construct
  source 1..15: mol_type = other DNA
cctaaactttctgca

SEQ ID NO: 8740 - DNA, 15 bp, synthetic construct
  source 1..15: mol_type = other DNA
tagctaaaacttcat

SEQ ID NO: 8741 - DNA, 15 bp, synthetic construct
  source 1..15: mol_type = other DNA
atagaaatgtacaat

SEQ ID NO: 8742 - DNA, 15 bp, synthetic construct
  source 1..15: mol_type = other DNA
tttcatatgacaaat

SEQ ID NO: 8743 - DNA, 15 bp, synthetic construct
  source 1..15: mol_type = other DNA
atagaaatgtacaat

SEQ ID NO: 8744 - DNA, 15 bp, synthetic construct
  source 1..15: mol_type = other DNA
agtctgctagttgtc

SEQ ID NO: 8745 - DNA, 15 bp, synthetic construct
  source 1..15: mol_type = other DNA
ttcagggctgagact

SEQ ID NO: 8746 - DNA, 15 bp, synthetic construct
  source 1..15: mol_type = other DNA
agtctgctagttgtc

SEQ ID NO: 8747 - DNA, 15 bp, synthetic construct
  source 1..15: mol_type = other DNA
tttgtatttttgttt

SEQ ID NO: 8748 - DNA, 15 bp, synthetic construct
  source 1..15: mol_type = other DNA
ctttgcctactaatg

SEQ ID NO: 8749 - DNA, 15 bp, synthetic construct
  source 1..15: mol_type = other DNA
atgtggcactaggat

SEQ ID NO: 8750 - DNA, 15 bp, synthetic construct
  source 1..15: mol_type = other DNA
aactaagggagctca

SEQ ID NO: 8751 - DNA, 15 bp, synthetic construct
  source 1..15: mol_type = other DNA
gtcacacactgtggt

SEQ ID NO: 8752 - DNA, 15 bp, synthetic construct
  source 1..15: mol_type = other DNA
gatcacaacttaaac

SEQ ID NO: 8753 - DNA, 15 bp, synthetic construct
  source 1..15: mol_type = other DNA
ttaggaaagaaaaac

SEQ ID NO: 8754 - DNA, 15 bp, synthetic construct
  source 1..15: mol_type = other DNA
ttctcatttgtggtt

SEQ ID NO: 8755 - DNA, 15 bp, synthetic construct
  source 1..15: mol_type = other DNA
taagatgccagtgaa

SEQ ID NO: 8756 - DNA, 15 bp, synthetic construct
  source 1..15: mol_type = other DNA
gctgatattcaaact

SEQ ID NO: 8757 - DNA, 15 bp, synthetic construct
  source 1..15: mol_type = other DNA
tagcattattgagta

SEQ ID NO: 8758 - DNA, 15 bp, synthetic construct
  source 1..15: mol_type = other DNA
agaacccttatttga

SEQ ID NO: 8759 - DNA, 15 bp, synthetic construct
  source 1..15: mol_type = other DNA
gctcactcccaggtg

SEQ ID NO: 8760 - DNA, 15 bp, synthetic construct
  source 1..15: mol_type = other DNA
ttttgtcttctgcaa

SEQ ID NO: 8761 - DNA, 15 bp, synthetic construct
  source 1..15: mol_type = other DNA
aatggttccttggtg

SEQ ID NO: 8762 - DNA, 15 bp, synthetic construct
  source 1..15: mol_type = other DNA
tgtaccaaaaccaga

SEQ ID NO: 8763 - DNA, 15 bp, synthetic construct
  source 1..15: mol_type = other DNA
attgtttttattgaa

SEQ ID NO: 8764 - DNA, 15 bp, synthetic construct
  source 1..15: mol_type = other DNA
gtaaaatgtcctagt

SEQ ID NO: 8765 - DNA, 15 bp, synthetic construct
  source 1..15: mol_type = other DNA
atgccaaagttagtt

SEQ ID NO: 8766 - DNA, 15 bp, synthetic construct
  source 1..15: mol_type = other DNA
agttgaacagtctct

SEQ ID NO: 8767 - DNA, 15 bp, synthetic construct
  source 1..15: mol_type = other DNA
gcatagagagaacca

SEQ ID NO: 8768 - DNA, 15 bp, synthetic construct
  source 1..15: mol_type = other DNA
gaagatctgtgaaac

SEQ ID NO: 8769 - DNA, 15 bp, synthetic construct
  source 1..15: mol_type = other DNA
agagtttatatagtg

SEQ ID NO: 8770 - DNA, 15 bp, synthetic construct
  source 1..15: mol_type = other DNA
ctgcatttattagcc

SEQ ID NO: 8771 - DNA, 15 bp, synthetic construct
  source 1..15: mol_type = other DNA
aacatctcatccttt

SEQ ID NO: 8772 - DNA, 15 bp, synthetic construct
  source 1..15: mol_type = other DNA
agttaatcacggcaa

SEQ ID NO: 8773 - DNA, 15 bp, synthetic construct
  source 1..15: mol_type = other DNA
aatcacaaagtacag

SEQ ID NO: 8774 - DNA, 15 bp, synthetic construct
  source 1..15: mol_type = other DNA
tttctcacctgaagt

SEQ ID NO: 8775 - DNA, 15 bp, synthetic construct
  source 1..15: mol_type = other DNA
ccttatgtgaaagga

SEQ ID NO: 8776 - DNA, 15 bp, synthetic construct
  source 1..15: mol_type = other DNA
agcacaggcttgaaa

SEQ ID NO: 8777 - DNA, 15 bp, synthetic construct
  source 1..15: mol_type = other DNA
ttctataacctgtca

SEQ ID NO: 8778 - DNA, 15 bp, synthetic construct
  source 1..15: mol_type = other DNA
aagacttggttaaca

SEQ ID NO: 8779 - DNA, 15 bp, synthetic construct
  source 1..15: mol_type = other DNA
tatcaacccacagaa

SEQ ID NO: 8780 - DNA, 15 bp, synthetic construct
  source 1..15: mol_type = other DNA
ttttcttgcaattgt

SEQ ID NO: 8781 - DNA, 15 bp, synthetic construct
  source 1..15: mol_type = other DNA
agaaaggcatttaat

SEQ ID NO: 8782 - DNA, 15 bp, synthetic construct
  source 1..15: mol_type = other DNA
gtacagaatctggct

SEQ ID NO: 8783 - DNA, 15 bp, synthetic construct
  source 1..15: mol_type = other DNA
tcctttctcaggcac

SEQ ID NO: 8784 - DNA, 15 bp, synthetic construct
  source 1..15: mol_type = other DNA
ccattttcagctttt

SEQ ID NO: 8785 - DNA, 15 bp, synthetic construct
  source 1..15: mol_type = other DNA
tagggtcactgttac

SEQ ID NO: 8786 - DNA, 15 bp, synthetic construct
  source 1..15: mol_type = other DNA
tttagcagcaagagg

SEQ ID NO: 8787 - DNA, 15 bp, synthetic construct
  source 1..15: mol_type = other DNA
cggtgcgactcatga

SEQ ID NO: 8788 - DNA, 15 bp, synthetic construct
  source 1..15: mol_type = other DNA
ccctcggcgggtatc

SEQ ID NO: 8789 - DNA, 15 bp, synthetic construct
  source 1..15: mol_type = other DNA
cagaggccaggattc

SEQ ID NO: 8790 - DNA, 15 bp, synthetic construct
  source 1..15: mol_type = other DNA
gcgtcgtcttaagag

SEQ ID NO: 8791 - DNA, 15 bp, synthetic construct
  source 1..15: mol_type = other DNA
cagcctcttattcta

SEQ ID NO: 8792 - DNA, 15 bp, synthetic construct
  source 1..15: mol_type = other DNA
agccaccctcaagtc

SEQ ID NO: 8793 - DNA, 15 bp, synthetic construct
  source 1..15: mol_type = other DNA
tcccagcagtagaca

SEQ ID NO: 8794 - DNA, 15 bp, synthetic construct
  source 1..15: mol_type = other DNA
ctcttctttctctca

SEQ ID NO: 8795 - DNA, 15 bp, synthetic construct
  source 1..15: mol_type = other DNA
ggaccacagtcagag

SEQ ID NO: 8796 - DNA, 15 bp, synthetic construct
  source 1..15: mol_type = other DNA
tgatccgctcacttt

SEQ ID NO: 8797 - DNA, 15 bp, synthetic construct
  source 1..15: mol_type = other DNA
tgaaaagggtctgcc

SEQ ID NO: 8798 - DNA, 15 bp, synthetic construct
  source 1..15: mol_type = other DNA
cagccttcagacacg

SEQ ID NO: 8799 - DNA, 15 bp, synthetic construct
  source 1..15: mol_type = other DNA
caggtagagactcgg

SEQ ID NO: 8800 - DNA, 15 bp, synthetic construct
  source 1..15: mol_type = other DNA
gctcctgtggaaatc

SEQ ID NO: 8801 - DNA, 15 bp, synthetic construct
  source 1..15: mol_type = other DNA
ctgatttcatcgtcg

SEQ ID NO: 8802 - DNA, 15 bp, synthetic construct
  source 1..15: mol_type = other DNA
atgaacacagctgtt

SEQ ID NO: 8803 - DNA, 15 bp, synthetic construct
  source 1..15: mol_type = other DNA
agtggaaaaattcat

SEQ ID NO: 8804 - DNA, 15 bp, synthetic construct
  source 1..15: mol_type = other DNA
aatttctgagttggt

SEQ ID NO: 8805 - DNA, 15 bp, synthetic construct
  source 1..15: mol_type = other DNA
gaggtagtctctctt

SEQ ID NO: 8806 - DNA, 15 bp, synthetic construct
  source 1..15: mol_type = other DNA
ttgcatcagaaagtg

SEQ ID NO: 8807 - DNA, 15 bp, synthetic construct
  source 1..15: mol_type = other DNA
tttccagtgattctg

SEQ ID NO: 8808 - DNA, 15 bp, synthetic construct
  source 1..15: mol_type = other DNA
ggctacagcttgagt

SEQ ID NO: 8809 - DNA, 15 bp, synthetic construct
  source 1..15: mol_type = other DNA
cagagttcctggcag

SEQ ID NO: 8810 - DNA, 15 bp, synthetic construct
  source 1..15: mol_type = other DNA
cctcagagaatcaca

SEQ ID NO: 8811 - DNA, 15 bp, synthetic construct
  source 1..15: mol_type = other DNA
acaaaggatgttgtt

SEQ ID NO: 8812 - DNA, 15 bp, synthetic construct
  source 1..15: mol_type = other DNA
gtcttcatgaacagt

SEQ ID NO: 8813 - DNA, 15 bp, synthetic construct
  source 1..15: mol_type = other DNA
taacctatgcttttt

SEQ ID NO: 8814 - DNA, 15 bp, synthetic construct
  source 1..15: mol_type = other DNA
tactgttcggtatct

SEQ ID NO: 8815 - DNA, 15 bp, synthetic construct
  source 1..15: mol_type = other DNA
cactttgcctcatgc

SEQ ID NO: 8816 - DNA, 15 bp, synthetic construct
  source 1..15: mol_type = other DNA
ctaaacgaattttgt

SEQ ID NO: 8817 - DNA, 15 bp, synthetic construct
  source 1..15: mol_type = other DNA
caaatctaaaaccag

SEQ ID NO: 8818 - DNA, 15 bp, synthetic construct
  source 1..15: mol_type = other DNA
aggttcctggaagtt

SEQ ID NO: 8819 - DNA, 15 bp, synthetic construct
  source 1..15: mol_type = other DNA
gtaatgggctgagaa

SEQ ID NO: 8820 - DNA, 15 bp, synthetic construct
  source 1..15: mol_type = other DNA
ccacttttgctgtat

SEQ ID NO: 8821 - DNA, 15 bp, synthetic construct
  source 1..15: mol_type = other DNA
gataaggatgtagcc

SEQ ID NO: 8822 - DNA, 15 bp, synthetic construct
  source 1..15: mol_type = other DNA
aggctaaaaatcaca

SEQ ID NO: 8823 - DNA, 15 bp, synthetic construct
  source 1..15: mol_type = other DNA
gacttgacaatgaaa

SEQ ID NO: 8824 - DNA, 15 bp, synthetic construct
  source 1..15: mol_type = other DNA
tattgtcccgagagg

SEQ ID NO: 8825 - DNA, 15 bp, synthetic construct
  source 1..15: mol_type = other DNA
cctttgattcactca

SEQ ID NO: 8826 - DNA, 15 bp, synthetic construct
  source 1..15: mol_type = other DNA
tcttattgaattcct

SEQ ID NO: 8827 - DNA, 15 bp, synthetic construct
  source 1..15: mol_type = other DNA
taacacagaatttgt

SEQ ID NO: 8828 - DNA, 15 bp, synthetic construct
  source 1..15: mol_type = other DNA
agaggctttctgtaa

SEQ ID NO: 8829 - DNA, 15 bp, synthetic construct
  source 1..15: mol_type = other DNA
atatcagcaggacag

SEQ ID NO: 8830 - DNA, 15 bp, synthetic construct
  source 1..15: mol_type = other DNA
gaagccattctgatt

SEQ ID NO: 8831 - DNA, 15 bp, synthetic construct
  source 1..15: mol_type = other DNA
tctccctttctgact

SEQ ID NO: 8832 - DNA, 15 bp, synthetic construct
  source 1..15: mol_type = other DNA
actgttccatgtgct

SEQ ID NO: 8833 - DNA, 15 bp, synthetic construct
  source 1..15: mol_type = other DNA
aagggacataaaggt

SEQ ID NO: 8834 - DNA, 15 bp, synthetic construct
  source 1..15: mol_type = other DNA
gatcattcctagaaa

SEQ ID NO: 8835 - DNA, 15 bp, synthetic construct
  source 1..15: mol_type = other DNA
agaccgtaccctgag

SEQ ID NO: 8836 - DNA, 15 bp, synthetic construct
  source 1..15: mol_type = other DNA
gatttgaatgtaaca

SEQ ID NO: 8837 - DNA, 15 bp, synthetic construct
  source 1..15: mol_type = other DNA
aggccactaccttga

SEQ ID NO: 8838 - DNA, 15 bp, synthetic construct
  source 1..15: mol_type = other DNA
gtgcttctgttagtg

SEQ ID NO: 8839 - DNA, 15 bp, synthetic construct
  source 1..15: mol_type = other DNA
tgtggttaagagtca

SEQ ID NO: 8840 - DNA, 15 bp, synthetic construct
  source 1..15: mol_type = other DNA
tccccattctctcag

SEQ ID NO: 8841 - DNA, 15 bp, synthetic construct
  source 1..15: mol_type = other DNA
ctcctagcgaagggc

SEQ ID NO: 8842 - DNA, 15 bp, synthetic construct
  source 1..15: mol_type = other DNA
gatcggcccagagta

SEQ ID NO: 8843 - DNA, 15 bp, synthetic construct
  source 1..15: mol_type = other DNA
ttttcttgatgctaa

SEQ ID NO: 8844 - DNA, 15 bp, synthetic construct
  source 1..15: mol_type = other DNA
ggcattttcagaagg

SEQ ID NO: 8845 - DNA, 15 bp, synthetic construct
  source 1..15: mol_type = other DNA
gtccatccagtaagt

SEQ ID NO: 8846 - DNA, 15 bp, synthetic construct
  source 1..15: mol_type = other DNA
tctgactgggcagac

SEQ ID NO: 8847 - DNA, 15 bp, synthetic construct
  source 1..15: mol_type = other DNA
tctgctgaaaaagga

SEQ ID NO: 8848 - DNA, 15 bp, synthetic construct
  source 1..15: mol_type = other DNA
tggccagtttcttct

SEQ ID NO: 8849 - DNA, 15 bp, synthetic construct
  source 1..15: mol_type = other DNA
ttgtgtttcttgcct

SEQ ID NO: 8850 - DNA, 15 bp, synthetic construct
  source 1..15: mol_type = other DNA
tatagcatgccctct

SEQ ID NO: 8851 - DNA, 15 bp, synthetic construct
  source 1..15: mol_type = other DNA
ctccagcgatctcca

SEQ ID NO: 8852 - DNA, 15 bp, synthetic construct
  source 1..15: mol_type = other DNA
cattctacttgcaaa

SEQ ID NO: 8853 - DNA, 15 bp, synthetic construct
  source 1..15: mol_type = other DNA
ttcagggtatccaca

SEQ ID NO: 8854 - DNA, 15 bp, synthetic construct
  source 1..15: mol_type = other DNA
agctgaaagaaatga

SEQ ID NO: 8855 - DNA, 15 bp, synthetic construct
  source 1..15: mol_type = other DNA
tctttctacaccttt

SEQ ID NO: 8856 - DNA, 15 bp, synthetic construct
  source 1..15: mol_type = other DNA
agacttaacctaggg

SEQ ID NO: 8857 - DNA, 15 bp, synthetic construct
  source 1..15: mol_type = other DNA
ctcacatagaacaac

SEQ ID NO: 8858 - DNA, 15 bp, synthetic construct
  source 1..15: mol_type = other DNA
aatgattctttctgt

SEQ ID NO: 8859 - DNA, 15 bp, synthetic construct
  source 1..15: mol_type = other DNA
atctgcccacatttc

SEQ ID NO: 8860 - DNA, 15 bp, synthetic construct
  source 1..15: mol_type = other DNA
tctcttacttcatct

SEQ ID NO: 8861 - DNA, 15 bp, synthetic construct
  source 1..15: mol_type = other DNA
acaatttctgcatga

SEQ ID NO: 8862 - DNA, 15 bp, synthetic construct
  source 1..15: mol_type = other DNA
gcagttaatgtgcta

SEQ ID NO: 8863 - DNA, 15 bp, synthetic construct
  source 1..15: mol_type = other DNA
aaaaataattttaaa

SEQ ID NO: 8864 - DNA, 15 bp, synthetic construct
  source 1..15: mol_type = other DNA
ctggttgtactatgc

SEQ ID NO: 8865 - DNA, 15 bp, synthetic construct
  source 1..15: mol_type = other DNA
atgttgattcacagc

SEQ ID NO: 8866 - DNA, 15 bp, synthetic construct
  source 1..15: mol_type = other DNA
acttaacagaaactg

SEQ ID NO: 8867 - DNA, 15 bp, synthetic construct
  source 1..15: mol_type = other DNA
gcatgtaagtcaagg

SEQ ID NO: 8868 - DNA, 15 bp, synthetic construct
  source 1..15: mol_type = other DNA
tttttaaagtttcct

SEQ ID NO: 8869 - DNA, 15 bp, synthetic construct
  source 1..15: mol_type = other DNA
gtagatggcataact

SEQ ID NO: 8870 - DNA, 15 bp, synthetic construct
  source 1..15: mol_type = other DNA
gctgttcacttacac

SEQ ID NO: 8871 - DNA, 15 bp, synthetic construct
  source 1..15: mol_type = other DNA
tcattaatccgacat

SEQ ID NO: 8872 - DNA, 15 bp, synthetic construct
  source 1..15: mol_type = other DNA
atgttgaagttcatg

SEQ ID NO: 8873 - DNA, 15 bp, synthetic construct
  source 1..15: mol_type = other DNA
tttgcgtgcagtcaa

SEQ ID NO: 8874 - DNA, 15 bp, synthetic construct
  source 1..15: mol_type = other DNA
gacaagaaaatgatt

SEQ ID NO: 8875 - DNA, 15 bp, synthetic construct
  source 1..15: mol_type = other DNA
tgaagacacaattct

SEQ ID NO: 8876 - DNA, 15 bp, synthetic construct
  source 1..15: mol_type = other DNA
cttttgtagtcccta

SEQ ID NO: 8877 - DNA, 15 bp, synthetic construct
  source 1..15: mol_type = other DNA
atgtgaaacaaaggg

SEQ ID NO: 8878 - DNA, 15 bp, synthetic construct
  source 1..15: mol_type = other DNA
cgctgttgacgtatg

SEQ ID NO: 8879 - DNA, 15 bp, synthetic construct
  source 1..15: mol_type = other DNA
atgaagtgaagagag

SEQ ID NO: 8880 - DNA, 15 bp, synthetic construct
  source 1..15: mol_type = other DNA
atcttttacaatgtt

SEQ ID NO: 8881 - DNA, 15 bp, synthetic construct
  source 1..15: mol_type = other DNA
atcacggctttaacc

SEQ ID NO: 8882 - DNA, 15 bp, synthetic construct
  source 1..15: mol_type = other DNA
cagatgaccctgagt

SEQ ID NO: 8883 - DNA, 15 bp, synthetic construct
  source 1..15: mol_type = other DNA
tctttgatgtaaatg

SEQ ID NO: 8884 - DNA, 15 bp, synthetic construct
  source 1..15: mol_type = other DNA
gttgaattaggtaaa

SEQ ID NO: 8885 - DNA, 15 bp, synthetic construct
  source 1..15: mol_type = other DNA
ttacttgggcacttt

SEQ ID NO: 8886 - DNA, 15 bp, synthetic construct
  source 1..15: mol_type = other DNA
ctcccctccttttgt

SEQ ID NO: 8887 - DNA, 15 bp, synthetic construct
  source 1..15: mol_type = other DNA
tttgttgatgaactt

SEQ ID NO: 8888 - DNA, 15 bp, synthetic construct
  source 1..15: mol_type = other DNA
aatggcatggcaaga

SEQ ID NO: 8889 - DNA, 15 bp, synthetic construct
  source 1..15: mol_type = other DNA
cttcagataataggg

SEQ ID NO: 8890 - DNA, 15 bp, synthetic construct
  source 1..15: mol_type = other DNA
tggtaattaaagaga

SEQ ID NO: 8891 - DNA, 15 bp, synthetic construct
  source 1..15: mol_type = other DNA
attgtagagctcttc

SEQ ID NO: 8892 - DNA, 15 bp, synthetic construct
  source 1..15: mol_type = other DNA
gtcagatgctttagt

SEQ ID NO: 8893 - DNA, 15 bp, synthetic construct
  source 1..15: mol_type = other DNA
caaaccaatcaatat

SEQ ID NO: 8894 - DNA, 15 bp, synthetic construct
  source 1..15: mol_type = other DNA
aggattttattttaa

SEQ ID NO: 8895 - DNA, 15 bp, synthetic construct
  source 1..15: mol_type = other DNA
gggtaaaagaaagga

SEQ ID NO: 8896 - DNA, 15 bp, synthetic construct
  source 1..15: mol_type = other DNA
ttgcgtagatatctt

SEQ ID NO: 8897 - DNA, 15 bp, synthetic construct
  source 1..15: mol_type = other DNA
cagttgaatcatcaa

SEQ ID NO: 8898 - DNA, 15 bp, synthetic construct
  source 1..15: mol_type = other DNA
aaagcatttatttgg

SEQ ID NO: 8899 - DNA, 15 bp, synthetic construct
  source 1..15: mol_type = other DNA
ataaacagcccctat

SEQ ID NO: 8900 - DNA, 15 bp, synthetic construct
  source 1..15: mol_type = other DNA
ttgtactgatgttgc

SEQ ID NO: 8901 - DNA, 15 bp, synthetic construct
  source 1..15: mol_type = other DNA
tgtcatttggattgg

SEQ ID NO: 8902 - DNA, 15 bp, synthetic construct
  source 1..15: mol_type = other DNA
ttctctaacagtgtg

SEQ ID NO: 8903 - DNA, 15 bp, synthetic construct
  source 1..15: mol_type = other DNA
ctcacggcagtgtat

SEQ ID NO: 8904 - DNA, 15 bp, synthetic construct
  source 1..15: mol_type = other DNA
aatgaaatgaagctc

SEQ ID NO: 8905 - DNA, 15 bp, synthetic construct
  source 1..15: mol_type = other DNA
atccaggtacagtgt

SEQ ID NO: 8906 - DNA, 15 bp, synthetic construct
  source 1..15: mol_type = other DNA
aagataggcctttgg

SEQ ID NO: 8907 - DNA, 15 bp, synthetic construct
  source 1..15: mol_type = other DNA
acactacctgattca

SEQ ID NO: 8908 - DNA, 15 bp, synthetic construct
  source 1..15: mol_type = other DNA
gttttgcacgatttg

SEQ ID NO: 8909 - DNA, 15 bp, synthetic construct
  source 1..15: mol_type = other DNA
tttacctgtattgat

SEQ ID NO: 8910 - DNA, 15 bp, synthetic construct
  source 1..15: mol_type = other DNA
ggagcgtggataata

SEQ ID NO: 8911 - DNA, 15 bp, synthetic construct
  source 1..15: mol_type = other DNA
atttgggttattagc

SEQ ID NO: 8912 - DNA, 15 bp, synthetic construct
  source 1..15: mol_type = other DNA
ttcacctacatgtgc

SEQ ID NO: 8913 - DNA, 15 bp, synthetic construct
  source 1..15: mol_type = other DNA
ggtccaggaataatc

SEQ ID NO: 8914 - DNA, 15 bp, synthetic construct
  source 1..15: mol_type = other DNA
taaggtgttactgtg

SEQ ID NO: 8915 - DNA, 15 bp, synthetic construct
  source 1..15: mol_type = other DNA
atagggtgcctaaaa

SEQ ID NO: 8916 - DNA, 15 bp, synthetic construct
  source 1..15: mol_type = other DNA
tgtgcagccaagaga

SEQ ID NO: 8917 - DNA, 15 bp, synthetic construct
  source 1..15: mol_type = other DNA
gtagtgttgctttta

SEQ ID NO: 8918 - DNA, 15 bp, synthetic construct
  source 1..15: mol_type = other DNA
tatgtggtaaatgcc

SEQ ID NO: 8919 - DNA, 15 bp, synthetic construct
  source 1..15: mol_type = other DNA
aacttcctgttgcgc

SEQ ID NO: 8920 - DNA, 15 bp, synthetic construct
  source 1..15: mol_type = other DNA
ggcattttaattagc

SEQ ID NO: 8921 - DNA, 15 bp, synthetic construct
  source 1..15: mol_type = other DNA
ttccgctctgacacc

SEQ ID NO: 8922 - DNA, 15 bp, synthetic construct
  source 1..15: mol_type = other DNA
cccggacgctgacta

SEQ ID NO: 8923 - DNA, 15 bp, synthetic construct
  source 1..15: mol_type = other DNA
gatgtagtgtccctg

SEQ ID NO: 8924 - DNA, 15 bp, synthetic construct
  source 1..15: mol_type = other DNA
gaccttaggcgattc

SEQ ID NO: 8925 - DNA, 15 bp, synthetic construct
  source 1..15: mol_type = other DNA
aacatgactaaggca

SEQ ID NO: 8926 - DNA, 15 bp, synthetic construct
  source 1..15: mol_type = other DNA
tattgtgacagatcc

SEQ ID NO: 8927 - DNA, 15 bp, synthetic construct
  source 1..15: mol_type = other DNA
tcagatgtctgaaac

SEQ ID NO: 8928 - DNA, 15 bp, synthetic construct
  source 1..15: mol_type = other DNA
gttttcaatttcctc

SEQ ID NO: 8929 - DNA, 15 bp, synthetic construct
  source 1..15: mol_type = other DNA
attctatttcctcaa

SEQ ID NO: 8930 - DNA, 15 bp, synthetic construct
  source 1..15: mol_type = other DNA
tgagattgctgttgt

SEQ ID NO: 8931 - DNA, 15 bp, synthetic construct
  source 1..15: mol_type = other DNA
tgagaggaataggtg

SEQ ID NO: 8932 - DNA, 15 bp, synthetic construct
  source 1..15: mol_type = other DNA
ccactttaccaaatt

SEQ ID NO: 8933 - DNA, 15 bp, synthetic construct
  source 1..15: mol_type = other DNA
gaacagaatctgtga

SEQ ID NO: 8934 - DNA, 15 bp, synthetic construct
  source 1..15: mol_type = other DNA
tgtatttgtcttact

SEQ ID NO: 8935 - DNA, 15 bp, synthetic construct
  source 1..15: mol_type = other DNA
cgactgtctgcaacc

SEQ ID NO: 8936 - DNA, 15 bp, synthetic construct
  source 1..15: mol_type = other DNA
ctcattttgtgtttc

SEQ ID NO: 8937 - DNA, 15 bp, synthetic construct
  source 1..15: mol_type = other DNA
agtttccagaattgg

SEQ ID NO: 8938 - DNA, 15 bp, synthetic construct
  source 1..15: mol_type = other DNA
cttattcttgtagac

SEQ ID NO: 8939 - DNA, 15 bp, synthetic construct
  source 1..15: mol_type = other DNA
gcagtgagtgatgtg

SEQ ID NO: 8940 - DNA, 15 bp, synthetic construct
  source 1..15: mol_type = other DNA
gcacatagaagcaag

SEQ ID NO: 8941 - DNA, 15 bp, synthetic construct
  source 1..15: mol_type = other DNA
cagcttgtcactcgg

SEQ ID NO: 8942 - DNA, 15 bp, synthetic construct
  source 1..15: mol_type = other DNA
ttcagcttcgaaacg

SEQ ID NO: 8943 - DNA, 15 bp, synthetic construct
  source 1..15: mol_type = other DNA
tacacattctcatca

SEQ ID NO: 8944 - DNA, 15 bp, synthetic construct
  source 1..15: mol_type = other DNA
gtctttcctgcagag

SEQ ID NO: 8945 - DNA, 15 bp, synthetic construct
  source 1..15: mol_type = other DNA
accattccaaaaatt

SEQ ID NO: 8946 - DNA, 15 bp, synthetic construct
  source 1..15: mol_type = other DNA
tcatccttatgctgt

SEQ ID NO: 8947 - DNA, 15 bp, synthetic construct
  source 1..15: mol_type = other DNA
gagctttcggaaccg

SEQ ID NO: 8948 - DNA, 15 bp, synthetic construct
  source 1..15: mol_type = other DNA
accgaatgtccaatc

SEQ ID NO: 8949 - DNA, 15 bp, synthetic construct
  source 1..15: mol_type = other DNA
agcctgggtgcatag

SEQ ID NO: 8950 - DNA, 15 bp, synthetic construct
  source 1..15: mol_type = other DNA
aaagatttagtgagt

SEQ ID NO: 8951 - DNA, 15 bp, synthetic construct
  source 1..15: mol_type = other DNA
cgctgggtagattta

SEQ ID NO: 8952 - DNA, 15 bp, synthetic construct
  source 1..15: mol_type = other DNA
atgatgccttttgtg

SEQ ID NO: 8953 - DNA, 15 bp, synthetic construct
  source 1..15: mol_type = other DNA
aatgtcgtcatagtc

SEQ ID NO: 8954 - DNA, 15 bp, synthetic construct
  source 1..15: mol_type = other DNA
tcttaaatgctcaga

SEQ ID NO: 8955 - DNA, 15 bp, synthetic construct
  source 1..15: mol_type = other DNA
cttgtcaacatccgc

SEQ ID NO: 8956 - DNA, 15 bp, synthetic construct
  source 1..15: mol_type = other DNA
ctagcagctgttacg

SEQ ID NO: 8957 - DNA, 15 bp, synthetic construct
  source 1..15: mol_type = other DNA
aggactacaaatatt

SEQ ID NO: 8958 - DNA, 15 bp, synthetic construct
  source 1..15: mol_type = other DNA
gttacatgaaccaca

SEQ ID NO: 8959 - DNA, 15 bp, synthetic construct
  source 1..15: mol_type = other DNA
cacaccacttcctca

SEQ ID NO: 8960 - DNA, 15 bp, synthetic construct
  source 1..15: mol_type = other DNA
tacgtaggtctccaa

SEQ ID NO: 8961 - DNA, 15 bp, synthetic construct
  source 1..15: mol_type = other DNA
caaggtccctgtgct

SEQ ID NO: 8962 - DNA, 15 bp, synthetic construct
  source 1..15: mol_type = other DNA
agaagaccgccttcg

SEQ ID NO: 8963 - DNA, 15 bp, synthetic construct
  source 1..15: mol_type = other DNA
tccatcagtagacgc

SEQ ID NO: 8964 - DNA, 15 bp, synthetic construct
  source 1..15: mol_type = other DNA
ccttggacatcacag

SEQ ID NO: 8965 - DNA, 15 bp, synthetic construct
  source 1..15: mol_type = other DNA
ggcattgacatcagc

SEQ ID NO: 8966 - DNA, 15 bp, synthetic construct
  source 1..15: mol_type = other DNA
tcctgttggatcacg

SEQ ID NO: 8967 - DNA, 15 bp, synthetic construct
  source 1..15: mol_type = other DNA
cttaactcttcacct

SEQ ID NO: 8968 - DNA, 15 bp, synthetic construct
  source 1..15: mol_type = other DNA
cagctgtcaggacta

SEQ ID NO: 8969 - DNA, 15 bp, synthetic construct
  source 1..15: mol_type = other DNA
gcagtgcggtgttgc

SEQ ID NO: 8970 - DNA, 15 bp, synthetic construct
  source 1..15: mol_type = other DNA
ccggtgcccgtggat

SEQ ID NO: 8971 - DNA, 15 bp, synthetic construct
  source 1..15: mol_type = other DNA
gccgtctccgtgtcg

SEQ ID NO: 8972 - DNA, 15 bp, synthetic construct
  source 1..15: mol_type = other DNA
ccagctgctgctgcg

SEQ ID NO: 8973 - DNA, 15 bp, synthetic construct
  source 1..15: mol_type = other DNA
tggaactgatgagac

SEQ ID NO: 8974 - DNA, 15 bp, synthetic construct
  source 1..15: mol_type = other DNA
ggaggtgcgcagccc

SEQ ID NO: 8975 - DNA, 15 bp, synthetic construct
  source 1..15: mol_type = other DNA
tagactggttactta

SEQ ID NO: 8976 - DNA, 15 bp, synthetic construct
  source 1..15: mol_type = other DNA
ctcaggacaaacagt

SEQ ID NO: 8977 - DNA, 15 bp, synthetic construct
  source 1..15: mol_type = other DNA
cttaaagacaaagaa

SEQ ID NO: 8978 - DNA, 15 bp, synthetic construct
  source 1..15: mol_type = other DNA
ataagtggtgttctc

SEQ ID NO: 8979 - DNA, 15 bp, synthetic construct
  source 1..15: mol_type = other DNA
aggaaacatgaaaaa

SEQ ID NO: 8980 - DNA, 15 bp, synthetic construct
  source 1..15: mol_type = other DNA
atagttccactaatc

SEQ ID NO: 8981 - DNA, 15 bp, synthetic construct
  source 1..15: mol_type = other DNA
tacttacacgcagag

SEQ ID NO: 8982 - DNA, 15 bp, synthetic construct
  source 1..15: mol_type = other DNA
ttccagatccttttg

SEQ ID NO: 8983 - DNA, 15 bp, synthetic construct
  source 1..15: mol_type = other DNA
caataaaagattggg

SEQ ID NO: 8984 - DNA, 15 bp, synthetic construct
  source 1..15: mol_type = other DNA
ttcaggccttcttcc

SEQ ID NO: 8985 - DNA, 15 bp, synthetic construct
  source 1..15: mol_type = other DNA
tgtatgtctgaagtc

SEQ ID NO: 8986 - DNA, 15 bp, synthetic construct
  source 1..15: mol_type = other DNA
aggtctagcagtacc

SEQ ID NO: 8987 - DNA, 15 bp, synthetic construct
  source 1..15: mol_type = other DNA
agaagaggctgcatt

SEQ ID NO: 8988 - DNA, 15 bp, synthetic construct
  source 1..15: mol_type = other DNA
gttgatcctttgagt

SEQ ID NO: 8989 - DNA, 15 bp, synthetic construct
  source 1..15: mol_type = other DNA
actatcccatctgac

SEQ ID NO: 8990 - DNA, 15 bp, synthetic construct
  source 1..15: mol_type = other DNA
tactctgagcagcat

SEQ ID NO: 8991 - DNA, 15 bp, synthetic construct
  source 1..15: mol_type = other DNA
tgttttgtctccatt

SEQ ID NO: 8992 - DNA, 15 bp, synthetic construct
  source 1..15: mol_type = other DNA
taggtgtaggagtgc

SEQ ID NO: 8993 - DNA, 15 bp, synthetic construct
  source 1..15: mol_type = other DNA
cactttctgttggtt

SEQ ID NO: 8994 - DNA, 15 bp, synthetic construct
  source 1..15: mol_type = other DNA
atgaaagcaaattga

SEQ ID NO: 8995 - DNA, 15 bp, synthetic construct
  source 1..15: mol_type = other DNA
ataagaataaagcat

SEQ ID NO: 8996 - DNA, 15 bp, synthetic construct
  source 1..15: mol_type = other DNA
aagaattcctacctg

SEQ ID NO: 8997 - DNA, 15 bp, synthetic construct
  source 1..15: mol_type = other DNA
tagatctagttgacc

SEQ ID NO: 8998 - DNA, 15 bp, synthetic construct
  source 1..15: mol_type = other DNA
acatcagcatttcct

SEQ ID NO: 8999 - DNA, 15 bp, synthetic construct
  source 1..15: mol_type = other DNA
atgcaggaagaaccc

SEQ ID NO: 9000 - DNA, 15 bp, synthetic construct
  source 1..15: mol_type = other DNA
tcttgaatgttaggg

SEQ ID NO: 9001 - DNA, 15 bp, synthetic construct
  source 1..15: mol_type = other DNA
accacatatccaaaa

SEQ ID NO: 9002 - DNA, 15 bp, synthetic construct
  source 1..15: mol_type = other DNA
acatggacaaataat

SEQ ID NO: 9003 - DNA, 15 bp, synthetic construct
  source 1..15: mol_type = other DNA
catagtcaaccttgt

SEQ ID NO: 9004 - DNA, 15 bp, synthetic construct
  source 1..15: mol_type = other DNA
tgacagggcgagaag

SEQ ID NO: 9005 - DNA, 15 bp, synthetic construct
  source 1..15: mol_type = other DNA
ctcccacttcagata

SEQ ID NO: 9006 - DNA, 15 bp, synthetic construct
  source 1..15: mol_type = other DNA
tgaactggatcactt

SEQ ID NO: 9007 - DNA, 15 bp, synthetic construct
  source 1..15: mol_type = other DNA
ccatcatcttttggg

SEQ ID NO: 9008 - DNA, 15 bp, synthetic construct
  source 1..15: mol_type = other DNA
tctgcgtagctcata

SEQ ID NO: 9009 - DNA, 15 bp, synthetic construct
  source 1..15: mol_type = other DNA
cagaaagcgagagga

SEQ ID NO: 9010 - DNA, 15 bp, synthetic construct
  source 1..15: mol_type = other DNA
ttctgcctcttttcg

SEQ ID NO: 9011 - DNA, 15 bp, synthetic construct
  source 1..15: mol_type = other DNA
gagggtctctaggcg

SEQ ID NO: 9012 - DNA, 15 bp, synthetic construct
  source 1..15: mol_type = other DNA
tgaggaaacatgctg

SEQ ID NO: 9013 - DNA, 15 bp, synthetic construct
  source 1..15: mol_type = other DNA
taactgccactatta

SEQ ID NO: 9014 - DNA, 15 bp, synthetic construct
  source 1..15: mol_type = other DNA
gtagaacacaaatca

SEQ ID NO: 9015 - DNA, 15 bp, synthetic construct
  source 1..15: mol_type = other DNA
ttgagaagtccagag

SEQ ID NO: 9016 - DNA, 15 bp, synthetic construct
  source 1..15: mol_type = other DNA
gcacaccgctcatcg

SEQ ID NO: 9017 - DNA, 15 bp, synthetic construct
  source 1..15: mol_type = other DNA
tccaccgcacgatag

SEQ ID NO: 9018 - DNA, 15 bp, synthetic construct
  source 1..15: mol_type = other DNA
cttgagtgcgccttt

SEQ ID NO: 9019 - DNA, 15 bp, synthetic construct
  source 1..15: mol_type = other DNA
aagaaacaaagtgac

SEQ ID NO: 9020 - DNA, 15 bp, synthetic construct
  source 1..15: mol_type = other DNA
tagagccctcctgtg

SEQ ID NO: 9021 - DNA, 15 bp, synthetic construct
  source 1..15: mol_type = other DNA
tatctaaggagactg

SEQ ID NO: 9022 - DNA, 15 bp, synthetic construct
  source 1..15: mol_type = other DNA
ctttttgcgaaacag

SEQ ID NO: 9023 - DNA, 15 bp, synthetic construct
  source 1..15: mol_type = other DNA
atgggagcttgaatg

SEQ ID NO: 9024 - DNA, 15 bp, synthetic construct
  source 1..15: mol_type = other DNA
gaaaacatcaaagag

SEQ ID NO: 9025 - DNA, 15 bp, synthetic construct
  source 1..15: mol_type = other DNA
ttcggcatatgaagc

SEQ ID NO: 9026 - DNA, 15 bp, synthetic construct
  source 1..15: mol_type = other DNA
tccagttccttcctc

SEQ ID NO: 9027 - DNA, 15 bp, synthetic construct
  source 1..15: mol_type = other DNA
aggccaaacgtatcc

SEQ ID NO: 9028 - DNA, 15 bp, synthetic construct
  source 1..15: mol_type = other DNA
tacaaagtaggcaga

SEQ ID NO: 9029 - DNA, 15 bp, synthetic construct
  source 1..15: mol_type = other DNA
caatgaactattccc

SEQ ID NO: 9030 - DNA, 15 bp, synthetic construct
  source 1..15: mol_type = other DNA
caaatgaccattgga

SEQ ID NO: 9031 - DNA, 15 bp, synthetic construct
  source 1..15: mol_type = other DNA
gcaatgctaaggtaa

SEQ ID NO: 9032 - DNA, 15 bp, synthetic construct
  source 1..15: mol_type = other DNA
aagattatcagcaga

SEQ ID NO: 9033 - DNA, 15 bp, synthetic construct
  source 1..15: mol_type = other DNA
atcttctcaatactt

SEQ ID NO: 9034 - DNA, 15 bp, synthetic construct
  source 1..15: mol_type = other DNA
agagtatgtctgtca

SEQ ID NO: 9035 - DNA, 15 bp, synthetic construct
  source 1..15: mol_type = other DNA
cttactgacagctta

SEQ ID NO: 9036 - DNA, 15 bp, synthetic construct
  source 1..15: mol_type = other DNA
atgacaggctgtttt

SEQ ID NO: 9037 - DNA, 15 bp, synthetic construct
  source 1..15: mol_type = other DNA
gagaaaacttaccgg

SEQ ID NO: 9038 - DNA, 15 bp, synthetic construct
  source 1..15: mol_type = other DNA
gggaattacagaagg

SEQ ID NO: 9039 - DNA, 15 bp, synthetic construct
  source 1..15: mol_type = other DNA
gtggtcaggaatcat

SEQ ID NO: 9040 - DNA, 15 bp, synthetic construct
  source 1..15: mol_type = other DNA
aagctatgtatgatt

SEQ ID NO: 9041 - DNA, 15 bp, synthetic construct
  source 1..15: mol_type = other DNA
atatgcccaggatat

SEQ ID NO: 9042 - DNA, 15 bp, synthetic construct
  source 1..15: mol_type = other DNA
aactgcaagaaagta

SEQ ID NO: 9043 - DNA, 15 bp, synthetic construct
  source 1..15: mol_type = other DNA
attgcaggcggatca

SEQ ID NO: 9044 - DNA, 15 bp, synthetic construct
  source 1..15: mol_type = other DNA
ccagttgactctagt

SEQ ID NO: 9045 - DNA, 15 bp, synthetic construct
  source 1..15: mol_type = other DNA
ggaggagactctctc

SEQ ID NO: 9046 - DNA, 15 bp, synthetic construct
  source 1..15: mol_type = other DNA
ttaaacctcatgctc

SEQ ID NO: 9047 - DNA, 15 bp, synthetic construct
  source 1..15: mol_type = other DNA
acctgacctatttct

SEQ ID NO: 9048 - DNA, 15 bp, synthetic construct
  source 1..15: mol_type = other DNA
tcaggaaaatattct

SEQ ID NO: 9049 - DNA, 15 bp, synthetic construct
  source 1..15: mol_type = other DNA
actttcatgatcact

SEQ ID NO: 9050 - DNA, 15 bp, synthetic construct
  source 1..15: mol_type = other DNA
gctgtgatgacatct

SEQ ID NO: 9051 - DNA, 15 bp, synthetic construct
  source 1..15: mol_type = other DNA
taaacttctttccat

SEQ ID NO: 9052 - DNA, 15 bp, synthetic construct
  source 1..15: mol_type = other DNA
attcagaaagtacat

SEQ ID NO: 9053 - DNA, 15 bp, synthetic construct
  source 1..15: mol_type = other DNA
acttacctgccagag

SEQ ID NO: 9054 - DNA, 15 bp, synthetic construct
  source 1..15: mol_type = other DNA
ctttaccaaagacca

SEQ ID NO: 9055 - DNA, 15 bp, synthetic construct
  source 1..15: mol_type = other DNA
tgttatgaacttagg

SEQ ID NO: 9056 - DNA, 15 bp, synthetic construct
  source 1..15: mol_type = other DNA
tttcctcctcagtcc

SEQ ID NO: 9057 - DNA, 15 bp, synthetic construct
  source 1..15: mol_type = other DNA
ccaaagaagatctga

SEQ ID NO: 9058 - DNA, 15 bp, synthetic construct
  source 1..15: mol_type = other DNA
ttggtataaatgaag

SEQ ID NO: 9059 - DNA, 15 bp, synthetic construct
  source 1..15: mol_type = other DNA
aaagtaagaactcca

SEQ ID NO: 9060 - DNA, 15 bp, synthetic construct
  source 1..15: mol_type = other DNA
ctatatgtaaatgct

SEQ ID NO: 9061 - DNA, 15 bp, synthetic construct
  source 1..15: mol_type = other DNA
ggtgtggcaatgaca

SEQ ID NO: 9062 - DNA, 15 bp, synthetic construct
  source 1..15: mol_type = other DNA
atgttgttaggtctg

SEQ ID NO: 9063 - DNA, 15 bp, synthetic construct
  source 1..15: mol_type = other DNA
aactacacacttcgg

SEQ ID NO: 9064 - DNA, 15 bp, synthetic construct
  source 1..15: mol_type = other DNA
tgaaaaaccgaagtg

SEQ ID NO: 9065 - DNA, 15 bp, synthetic construct
  source 1..15: mol_type = other DNA
aacaagaagagagaa

SEQ ID NO: 9066 - DNA, 15 bp, synthetic construct
  source 1..15: mol_type = other DNA
tagtaatttgatcgc

SEQ ID NO: 9067 - DNA, 15 bp, synthetic construct
  source 1..15: mol_type = other DNA
atcttcgttcagatc

SEQ ID NO: 9068 - DNA, 15 bp, synthetic construct
  source 1..15: mol_type = other DNA
actttctaagctgtc

SEQ ID NO: 9069 - DNA, 15 bp, synthetic construct
  source 1..15: mol_type = other DNA
aagctaactagtcgc

SEQ ID NO: 9070 - DNA, 15 bp, synthetic construct
  source 1..15: mol_type = other DNA
atatgctgggcccat

SEQ ID NO: 9071 - DNA, 15 bp, synthetic construct
  source 1..15: mol_type = other DNA
acaacctgcaagaat

SEQ ID NO: 9072 - DNA, 15 bp, synthetic construct
  source 1..15: mol_type = other DNA
attctgctaaaagtg

SEQ ID NO: 9073 - DNA, 15 bp, synthetic construct
  source 1..15: mol_type = other DNA
tccttgataaaaagc

SEQ ID NO: 9074 - DNA, 15 bp, synthetic construct
  source 1..15: mol_type = other DNA
gttaatggagagtgg

SEQ ID NO: 9075 - DNA, 15 bp, synthetic construct
  source 1..15: mol_type = other DNA
caacctgcaagagaa

SEQ ID NO: 9076 - DNA, 15 bp, synthetic construct
  source 1..15: mol_type = other DNA
aatctagctagcttt

SEQ ID NO: 9077 - DNA, 15 bp, synthetic construct
  source 1..15: mol_type = other DNA
acttaatgccatcag

SEQ ID NO: 9078 - DNA, 15 bp, synthetic construct
  source 1..15: mol_type = other DNA
gtgtgaaatcatagg

SEQ ID NO: 9079 - DNA, 15 bp, synthetic construct
  source 1..15: mol_type = other DNA
atattgaactgacaa

SEQ ID NO: 9080 - DNA, 15 bp, synthetic construct
  source 1..15: mol_type = other DNA
gttgatgttgatggt

SEQ ID NO: 9081 - DNA, 15 bp, synthetic construct
  source 1..15: mol_type = other DNA
tactgctcctcaacc

SEQ ID NO: 9082 - DNA, 15 bp, synthetic construct
  source 1..15: mol_type = other DNA
gtctgtttacactcc

SEQ ID NO: 9083 - DNA, 15 bp, synthetic construct
  source 1..15: mol_type = other DNA
ggaaaaactgcaata

SEQ ID NO: 9084 - DNA, 15 bp, synthetic construct
  source 1..15: mol_type = other DNA
cccgctgaaactagg

SEQ ID NO: 9085 - DNA, 15 bp, synthetic construct
  source 1..15: mol_type = other DNA
tttaggactgcatgc

SEQ ID NO: 9086 - DNA, 15 bp, synthetic construct
  source 1..15: mol_type = other DNA
cagtggtttttaagt

SEQ ID NO: 9087 - DNA, 15 bp, synthetic construct
  source 1..15: mol_type = other DNA
acttgattcagaaca

SEQ ID NO: 9088 - DNA, 15 bp, synthetic construct
  source 1..15: mol_type = other DNA
tgccttctagaactc

SEQ ID NO: 9089 - DNA, 15 bp, synthetic construct
  source 1..15: mol_type = other DNA
aaagattccccactg

SEQ ID NO: 9090 - DNA, 15 bp, synthetic construct
  source 1..15: mol_type = other DNA
ctaggtctaatcctc

SEQ ID NO: 9091 - DNA, 15 bp, synthetic construct
  source 1..15: mol_type = other DNA
tcataggcgaggtaa

SEQ ID NO: 9092 - DNA, 15 bp, synthetic construct
  source 1..15: mol_type = other DNA
attgtgtctctgatg

SEQ ID NO: 9093 - DNA, 15 bp, synthetic construct
  source 1..15: mol_type = other DNA
catctttgattctac

SEQ ID NO: 9094 - DNA, 15 bp, synthetic construct
  source 1..15: mol_type = other DNA
tttgaaaaagaaaag

SEQ ID NO: 9095 - DNA, 15 bp, synthetic construct
  source 1..15: mol_type = other DNA
ctatggaaagtcctc

SEQ ID NO: 9096 - DNA, 15 bp, synthetic construct
  source 1..15: mol_type = other DNA
tgaaagccaatgaca

SEQ ID NO: 9097 - DNA, 15 bp, synthetic construct
  source 1..15: mol_type = other DNA
atccatgtgtaccac

SEQ ID NO: 9098 - DNA, 15 bp, synthetic construct
  source 1..15: mol_type = other DNA
tcgatattgtaacac

SEQ ID NO: 9099 - DNA, 15 bp, synthetic construct
  source 1..15: mol_type = other DNA
ctcatatgtataatt

SEQ ID NO: 9100 - DNA, 15 bp, synthetic construct
  source 1..15: mol_type = other DNA
tttgtaaggaaggtg

SEQ ID NO: 9101 - DNA, 15 bp, synthetic construct
  source 1..15: mol_type = other DNA
gtggacaccaaagag

SEQ ID NO: 9102 - DNA, 15 bp, synthetic construct
  source 1..15: mol_type = other DNA
aaggtcccccagtaa

SEQ ID NO: 9103 - DNA, 15 bp, synthetic construct
  source 1..15: mol_type = other DNA
taatgacatggctat

SEQ ID NO: 9104 - DNA, 15 bp, synthetic construct
  source 1..15: mol_type = other DNA
atgactaacttcatg

SEQ ID NO: 9105 - DNA, 15 bp, synthetic construct
  source 1..15: mol_type = other DNA
cagcctaaagctgat

SEQ ID NO: 9106 - DNA, 15 bp, synthetic construct
  source 1..15: mol_type = other DNA
agctccttagcttac

SEQ ID NO: 9107 - DNA, 15 bp, synthetic construct
  source 1..15: mol_type = other DNA
gaggatgcttgagac

SEQ ID NO: 9108 - DNA, 15 bp, synthetic construct
  source 1..15: mol_type = other DNA
gaagttgcagtcagt

SEQ ID NO: 9109 - DNA, 15 bp, synthetic construct
  source 1..15: mol_type = other DNA
gaaatcaagggtcat

SEQ ID NO: 9110 - DNA, 15 bp, synthetic construct
  source 1..15: mol_type = other DNA
ctgggttaatttgct

SEQ ID NO: 9111 - DNA, 15 bp, synthetic construct
  source 1..15: mol_type = other DNA
aatccccttgttccc

SEQ ID NO: 9112 - DNA, 15 bp, synthetic construct
  source 1..15: mol_type = other DNA
tagttgtacttgtct

SEQ ID NO: 9113 - DNA, 15 bp, synthetic construct
  source 1..15: mol_type = other DNA
acttggccttcaatg

SEQ ID NO: 9114 - DNA, 15 bp, synthetic construct
  source 1..15: mol_type = other DNA
gagaccagattggca

SEQ ID NO: 9115 - DNA, 15 bp, synthetic construct
  source 1..15: mol_type = other DNA
agagataagactgag

SEQ ID NO: 9116 - DNA, 15 bp, synthetic construct
  source 1..15: mol_type = other DNA
gtggagggtacctac

SEQ ID NO: 9117 - DNA, 15 bp, synthetic construct
  source 1..15: mol_type = other DNA
gtgagcctttgagtt

SEQ ID NO: 9118 - DNA, 15 bp, synthetic construct
  source 1..15: mol_type = other DNA
tcaaaggctcacctc

SEQ ID NO: 9119 - DNA, 15 bp, synthetic construct
  source 1..15: mol_type = other DNA
ccccatgatctagcc

SEQ ID NO: 9120 - DNA, 15 bp, synthetic construct
  source 1..15: mol_type = other DNA
ggctagcaccaggta

SEQ ID NO: 9121 - DNA, 15 bp, synthetic construct
  source 1..15: mol_type = other DNA
tgacatccctacttg

SEQ ID NO: 9122 - DNA, 15 bp, synthetic construct
  source 1..15: mol_type = other DNA
agtagggatgtcatg

SEQ ID NO: 9123 - DNA, 15 bp, synthetic construct
  source 1..15: mol_type = other DNA
ttcattaagccatcc

SEQ ID NO: 9124 - DNA, 15 bp, synthetic construct
  source 1..15: mol_type = other DNA
atccaggagtattag

SEQ ID NO: 9125 - DNA, 15 bp, synthetic construct
  source 1..15: mol_type = other DNA
gcatagcaccagttc

SEQ ID NO: 9126 - DNA, 15 bp, synthetic construct
  source 1..15: mol_type = other DNA
tgaactggtgctatg

SEQ ID NO: 9127 - DNA, 15 bp, synthetic construct
  source 1..15: mol_type = other DNA
agcctctcattctct

SEQ ID NO: 9128 - DNA, 15 bp, synthetic construct
  source 1..15: mol_type = other DNA
atgctacaggagttc

SEQ ID NO: 9129 - DNA, 15 bp, synthetic construct
  source 1..15: mol_type = other DNA
agcctctcattctct

SEQ ID NO: 9130 - DNA, 15 bp, synthetic construct
  source 1..15: mol_type = other DNA
aatggactgcaaggg

SEQ ID NO: 9131 - DNA, 15 bp, synthetic construct
  source 1..15: mol_type = other DNA
tccccatcctactct

SEQ ID NO: 9132 - DNA, 15 bp, synthetic construct
  source 1..15: mol_type = other DNA
aatggactgcaaggg

SEQ ID NO: 9133 - DNA, 15 bp, synthetic construct
  source 1..15: mol_type = other DNA
attccaaccctaatc

SEQ ID NO: 9134 - DNA, 15 bp, synthetic construct
  source 1..15: mol_type = other DNA
aggctgacgaatgaa

SEQ ID NO: 9135 - DNA, 15 bp, synthetic construct
  source 1..15: mol_type = other DNA
gcctgcctatactca

SEQ ID NO: 9136 - DNA, 15 bp, synthetic construct
  source 1..15: mol_type = other DNA
agcaccctgcgatat

SEQ ID NO: 9137 - DNA, 15 bp, synthetic construct
  source 1..15: mol_type = other DNA
gcctgcctatactca

SEQ ID NO: 9138 - DNA, 15 bp, synthetic construct
  source 1..15: mol_type = other DNA
caagctcaccaagtt

SEQ ID NO: 9139 - DNA, 15 bp, synthetic construct
  source 1..15: mol_type = other DNA
accatgagggtgacc

SEQ ID NO: 9140 - DNA, 15 bp, synthetic construct
  source 1..15: mol_type = other DNA
caagctcaccaagtt

SEQ ID NO: 9141 - DNA, 15 bp, synthetic construct
  source 1..15: mol_type = other DNA
gttttacgaagggag

SEQ ID NO: 9142 - DNA, 15 bp, synthetic construct
  source 1..15: mol_type = other DNA
tcatgagatcatgtg

SEQ ID NO: 9143 - DNA, 15 bp, synthetic construct
  source 1..15: mol_type = other DNA
ggcttcggttgatgc

SEQ ID NO: 9144 - DNA, 15 bp, synthetic construct
  source 1..15: mol_type = other DNA
tgatgcttgaggcta

SEQ ID NO: 9145 - DNA, 15 bp, synthetic construct
  source 1..15: mol_type = other DNA
tattaacccccatgc

SEQ ID NO: 9146 - DNA, 15 bp, synthetic construct
  source 1..15: mol_type = other DNA
ccaacttgggtgtgc

SEQ ID NO: 9147 - DNA, 15 bp, synthetic construct
  source 1..15: mol_type = other DNA
tactggtccttcccc

SEQ ID NO: 9148 - DNA, 15 bp, synthetic construct
  source 1..15: mol_type = other DNA
cattgatgatgacct

SEQ ID NO: 9149 - DNA, 15 bp, synthetic construct
  source 1..15: mol_type = other DNA
gtttgcaaaagttcc

SEQ ID NO: 9150 - DNA, 15 bp, synthetic construct
  source 1..15: mol_type = other DNA
ctggaacaagactcg

SEQ ID NO: 9151 - DNA, 15 bp, synthetic construct
  source 1..15: mol_type = other DNA
actgacaacagtccc

SEQ ID NO: 9152 - DNA, 15 bp, synthetic construct
  source 1..15: mol_type = other DNA
gtcagtaagatctgg

SEQ ID NO: 9153 - DNA, 15 bp, synthetic construct
  source 1..15: mol_type = other DNA
cctctcattccctta

SEQ ID NO: 9154 - DNA, 15 bp, synthetic construct
  source 1..15: mol_type = other DNA
agatctacaatgagc

SEQ ID NO: 9155 - DNA, 15 bp, synthetic construct
  source 1..15: mol_type = other DNA
gttcagttctgagct

SEQ ID NO: 9156 - DNA, 15 bp, synthetic construct
  source 1..15: mol_type = other DNA
atcatacatgcgcta

SEQ ID NO: 9157 - DNA, 15 bp, synthetic construct
  source 1..15: mol_type = other DNA
gtagcatcaatggtg

SEQ ID NO: 9158 - DNA, 15 bp, synthetic construct
  source 1..15: mol_type = other DNA
gttatgcgggtaatc

SEQ ID NO: 9159 - DNA, 15 bp, synthetic construct
  source 1..15: mol_type = other DNA
tggtgttatgtgagc

SEQ ID NO: 9160 - DNA, 15 bp, synthetic construct
  source 1..15: mol_type = other DNA
tgacagggagtgtac

SEQ ID NO: 9161 - DNA, 15 bp, synthetic construct
  source 1..15: mol_type = other DNA
gagaagttaactcgt

SEQ ID NO: 9162 - DNA, 15 bp, synthetic construct
  source 1..15: mol_type = other DNA
ggagaactgctttat

SEQ ID NO: 9163 - DNA, 15 bp, synthetic construct
  source 1..15: mol_type = other DNA
gaagttgagaagtcc

SEQ ID NO: 9164 - DNA, 15 bp, synthetic construct
  source 1..15: mol_type = other DNA
aatgttaagcaggta

SEQ ID NO: 9165 - DNA, 15 bp, synthetic construct
  source 1..15: mol_type = other DNA
tcctggccaagatca

SEQ ID NO: 9166 - DNA, 15 bp, synthetic construct
  source 1..15: mol_type = other DNA
ttgtccaatttggag

SEQ ID NO: 9167 - DNA, 15 bp, synthetic construct
  source 1..15: mol_type = other DNA
ttaacgtggaagatt

SEQ ID NO: 9168 - DNA, 15 bp, synthetic construct
  source 1..15: mol_type = other DNA
ccatctctctaaaag

SEQ ID NO: 9169 - DNA, 15 bp, synthetic construct
  source 1..15: mol_type = other DNA
tgttcaatcttccag

SEQ ID NO: 9170 - DNA, 15 bp, synthetic construct
  source 1..15: mol_type = other DNA
actagtacttcacct

SEQ ID NO: 9171 - DNA, 15 bp, synthetic construct
  source 1..15: mol_type = other DNA
cagtggcaatgaact

SEQ ID NO: 9172 - DNA, 15 bp, synthetic construct
  source 1..15: mol_type = other DNA
agttatcatagctgt

SEQ ID NO: 9173 - DNA, 15 bp, synthetic construct
  source 1..15: mol_type = other DNA
gtagtaaccgatgtg

SEQ ID NO: 9174 - DNA, 15 bp, synthetic construct
  source 1..15: mol_type = other DNA
agctgtatttgacca

SEQ ID NO: 9175 - DNA, 15 bp, synthetic construct
  source 1..15: mol_type = other DNA
tcaatctggagaatc

SEQ ID NO: 9176 - DNA, 15 bp, synthetic construct
  source 1..15: mol_type = other DNA
agaagtggctaatct

SEQ ID NO: 9177 - DNA, 15 bp, synthetic construct
  source 1..15: mol_type = other DNA
agtcgcaaggaaatt

SEQ ID NO: 9178 - DNA, 15 bp, synthetic construct
  source 1..15: mol_type = other DNA
aagtccctctcgaat

SEQ ID NO: 9179 - DNA, 15 bp, synthetic construct
  source 1..15: mol_type = other DNA
ggatcactactaggg

SEQ ID NO: 9180 - DNA, 15 bp, synthetic construct
  source 1..15: mol_type = other DNA
catgtgccactaaca

SEQ ID NO: 9181 - DNA, 15 bp, synthetic construct
  source 1..15: mol_type = other DNA
tacaggacttacgcg

SEQ ID NO: 9182 - DNA, 15 bp, synthetic construct
  source 1..15: mol_type = other DNA
caccatctggaagcc

SEQ ID NO: 9183 - DNA, 15 bp, synthetic construct
  source 1..15: mol_type = other DNA
tttataggctgagat

SEQ ID NO: 9184 - DNA, 15 bp, synthetic construct
  source 1..15: mol_type = other DNA
cagcactagggctac

SEQ ID NO: 9185 - DNA, 15 bp, synthetic construct
  source 1..15: mol_type = other DNA
atcattctccttacc

SEQ ID NO: 9186 - DNA, 15 bp, synthetic construct
  source 1..15: mol_type = other DNA
agaattggaactggt

SEQ ID NO: 9187 - DNA, 15 bp, synthetic construct
  source 1..15: mol_type = other DNA
cggctacttaaggtc

SEQ ID NO: 9188 - DNA, 15 bp, synthetic construct
  source 1..15: mol_type = other DNA
gatgataagtacttt

SEQ ID NO: 9189 - DNA, 15 bp, synthetic construct
  source 1..15: mol_type = other DNA
aactctctattgtaa

SEQ ID NO: 9190 - DNA, 15 bp, synthetic construct
  source 1..15: mol_type = other DNA
caatagagagttact

SEQ ID NO: 9191 - DNA, 15 bp, synthetic construct
  source 1..15: mol_type = other DNA
tgctcttggtgctag

SEQ ID NO: 9192 - DNA, 15 bp, synthetic construct
  source 1..15: mol_type = other DNA
agacaggaggtaaga

SEQ ID NO: 9193 - DNA, 15 bp, synthetic construct
  source 1..15: mol_type = other DNA
gaagttcgatctggt

SEQ ID NO: 9194 - DNA, 15 bp, synthetic construct
  source 1..15: mol_type = other DNA
gtcttcaggatgacg

SEQ ID NO: 9195 - DNA, 15 bp, synthetic construct
  source 1..15: mol_type = other DNA
attgctctgatgtcc

SEQ ID NO: 9196 - DNA, 15 bp, synthetic construct
  source 1..15: mol_type = other DNA
tcaataatcagttcc

SEQ ID NO: 9197 - DNA, 15 bp, synthetic construct
  source 1..15: mol_type = other DNA
atgctgtctctttgg

SEQ ID NO: 9198 - DNA, 15 bp, synthetic construct
  source 1..15: mol_type = other DNA
tgttactggtgcatc

SEQ ID NO: 9199 - DNA, 15 bp, synthetic construct
  source 1..15: mol_type = other DNA
cacacttaattgtac

SEQ ID NO: 9200 - DNA, 15 bp, synthetic construct
  source 1..15: mol_type = other DNA
gtggatgtacccaag

SEQ ID NO: 9201 - DNA, 15 bp, synthetic construct
  source 1..15: mol_type = other DNA
tccagaacatccacc

SEQ ID NO: 9202 - DNA, 15 bp, synthetic construct
  source 1..15: mol_type = other DNA
ttcagtctttcatac

SEQ ID NO: 9203 - DNA, 15 bp, synthetic construct
  source 1..15: mol_type = other DNA
ccttgtgatccttgc

SEQ ID NO: 9204 - DNA, 15 bp, synthetic construct
  source 1..15: mol_type = other DNA
tcacctcaaattgcc

SEQ ID NO: 9205 - DNA, 15 bp, synthetic construct
  source 1..15: mol_type = other DNA
tatctcctacaggtg

SEQ ID NO: 9206 - DNA, 15 bp, synthetic construct
  source 1..15: mol_type = other DNA
gctcaccttgtagag

SEQ ID NO: 9207 - DNA, 15 bp, synthetic construct
  source 1..15: mol_type = other DNA
gtgcgagaggaagcc

SEQ ID NO: 9208 - DNA, 15 bp, synthetic construct
  source 1..15: mol_type = other DNA
cacgagcatccactg

SEQ ID NO: 9209 - DNA, 15 bp, synthetic construct
  source 1..15: mol_type = other DNA
tgagaaccccttcgc

SEQ ID NO: 9210 - DNA, 15 bp, synthetic construct
  source 1..15: mol_type = other DNA
caaagattttcccat

SEQ ID NO: 9211 - DNA, 15 bp, synthetic construct
  source 1..15: mol_type = other DNA
actgttaaaggtcag

SEQ ID NO: 9212 - DNA, 15 bp, synthetic construct
  source 1..15: mol_type = other DNA
cacagtatgtcaaat

SEQ ID NO: 9213 - DNA, 15 bp, synthetic construct
  source 1..15: mol_type = other DNA
ggccaggtaggatgg

SEQ ID NO: 9214 - DNA, 15 bp, synthetic construct
  source 1..15: mol_type = other DNA
cccatccacactgag

SEQ ID NO: 9215 - DNA, 15 bp, synthetic construct
  source 1..15: mol_type = other DNA
gagaccccactgttc

SEQ ID NO: 9216 - DNA, 15 bp, synthetic construct
  source 1..15: mol_type = other DNA
ggaaaggtaggacaa

SEQ ID NO: 9217 - DNA, 15 bp, synthetic construct
  source 1..15: mol_type = other DNA
taaaagttcatccca

SEQ ID NO: 9218 - DNA, 15 bp, synthetic construct
  source 1..15: mol_type = other DNA
aagaggcagtgcatg

SEQ ID NO: 9219 - DNA, 15 bp, synthetic construct
  source 1..15: mol_type = other DNA
acagttctatggagg

SEQ ID NO: 9220 - DNA, 15 bp, synthetic construct
  source 1..15: mol_type = other DNA
ctcaccagttataga

SEQ ID NO: 9221 - DNA, 15 bp, synthetic construct
  source 1..15: mol_type = other DNA
aacagggagatgtgt

SEQ ID NO: 9222 - DNA, 15 bp, synthetic construct
  source 1..15: mol_type = other DNA
tcaaagttgtttgga

SEQ ID NO: 9223 - DNA, 15 bp, synthetic construct
  source 1..15: mol_type = other DNA
ttgtcgggtcacatt

SEQ ID NO: 9224 - DNA, 15 bp, synthetic construct
  source 1..15: mol_type = other DNA
cagacagatgagtga

SEQ ID NO: 9225 - DNA, 15 bp, synthetic construct
  source 1..15: mol_type = other DNA
catgagcctgtttgg

SEQ ID NO: 9226 - DNA, 15 bp, synthetic construct
  source 1..15: mol_type = other DNA
gcccttgtagatgat

SEQ ID NO: 9227 - DNA, 15 bp, synthetic construct
  source 1..15: mol_type = other DNA
tggttcctgattaac

SEQ ID NO: 9228 - DNA, 15 bp, synthetic construct
  source 1..15: mol_type = other DNA
taccccgtcattcac

SEQ ID NO: 9229 - DNA, 15 bp, synthetic construct
  source 1..15: mol_type = other DNA
gggatttttaggatg

SEQ ID NO: 9230 - DNA, 15 bp, synthetic construct
  source 1..15: mol_type = other DNA
taatagctgcatccg

SEQ ID NO: 9231 - DNA, 15 bp, synthetic construct
  source 1..15: mol_type = other DNA
agaagatggatgccc

SEQ ID NO: 9232 - DNA, 15 bp, synthetic construct
  source 1..15: mol_type = other DNA
aaacgtccaatcttg

SEQ ID NO: 9233 - DNA, 15 bp, synthetic construct
  source 1..15: mol_type = other DNA
acatctcactgatgc

SEQ ID NO: 9234 - DNA, 15 bp, synthetic construct
  source 1..15: mol_type = other DNA
agaactgtttctcct

SEQ ID NO: 9235 - DNA, 15 bp, synthetic construct
  source 1..15: mol_type = other DNA
actcctcatgtacct

SEQ ID NO: 9236 - DNA, 15 bp, synthetic construct
  source 1..15: mol_type = other DNA
gacttccagtaccct

SEQ ID NO: 9237 - DNA, 15 bp, synthetic construct
  source 1..15: mol_type = other DNA
cttgcacgtgtgtct

SEQ ID NO: 9238 - DNA, 15 bp, synthetic construct
  source 1..15: mol_type = other DNA
agacctgtacaggag

SEQ ID NO: 9239 - DNA, 15 bp, synthetic construct
  source 1..15: mol_type = other DNA
ctgtccacagcatta

SEQ ID NO: 9240 - DNA, 15 bp, synthetic construct
  source 1..15: mol_type = other DNA
ggaaggacagttcca

SEQ ID NO: 9241 - DNA, 15 bp, synthetic construct
  source 1..15: mol_type = other DNA
tctgtcctgctactg

SEQ ID NO: 9242 - DNA, 15 bp, synthetic construct
  source 1..15: mol_type = other DNA
catgggccccaactc

SEQ ID NO: 9243 - DNA, 15 bp, synthetic construct
  source 1..15: mol_type = other DNA
tccttgtaacctctg

SEQ ID NO: 9244 - DNA, 15 bp, synthetic construct
  source 1..15: mol_type = other DNA
tcaacatgaaacagc

SEQ ID NO: 9245 - DNA, 15 bp, synthetic construct
  source 1..15: mol_type = other DNA
tcttctttctacagg

SEQ ID NO: 9246 - DNA, 15 bp, synthetic construct
  source 1..15: mol_type = other DNA
ccaccactctcggta

SEQ ID NO: 9247 - DNA, 15 bp, synthetic construct
  source 1..15: mol_type = other DNA
cggcgctctgtgtgt

SEQ ID NO: 9248 - DNA, 15 bp, synthetic construct
  source 1..15: mol_type = other DNA
gatgcacactcatcg

SEQ ID NO: 9249 - DNA, 15 bp, synthetic construct
  source 1..15: mol_type = other DNA
gaatgaatccacgag

SEQ ID NO: 9250 - DNA, 15 bp, synthetic construct
  source 1..15: mol_type = other DNA
agccatgatgcttac

SEQ ID NO: 9251 - DNA, 15 bp, synthetic construct
  source 1..15: mol_type = other DNA
tgcgcgccaggctac

SEQ ID NO: 9252 - DNA, 15 bp, synthetic construct
  source 1..15: mol_type = other DNA
ggcactcgtcgaggt

SEQ ID NO: 9253 - DNA, 15 bp, synthetic construct
  source 1..15: mol_type = other DNA
tgcgcgccaggctac

SEQ ID NO: 9254 - DNA, 15 bp, synthetic construct
  source 1..15: mol_type = other DNA
ctcccgctcgcagtg

SEQ ID NO: 9255 - DNA, 15 bp, synthetic construct
  source 1..15: mol_type = other DNA
aggttccggtgcgac

SEQ ID NO: 9256 - DNA, 15 bp, synthetic construct
  source 1..15: mol_type = other DNA
ctcccgctcgcagtg

SEQ ID NO: 9257 - DNA, 15 bp, synthetic construct
  source 1..15: mol_type = other DNA
ccgtgagacctgatg

SEQ ID NO: 9258 - DNA, 15 bp, synthetic construct
  source 1..15: mol_type = other DNA
ggcactcgcgtgcag

SEQ ID NO: 9259 - DNA, 15 bp, synthetic construct
  source 1..15: mol_type = other DNA
gtctctctagctata

SEQ ID NO: 9260 - DNA, 15 bp, synthetic construct
  source 1..15: mol_type = other DNA
ggcatctggacatgg

SEQ ID NO: 9261 - DNA, 15 bp, synthetic construct
  source 1..15: mol_type = other DNA
tgaaccttggctttg

SEQ ID NO: 9262 - DNA, 15 bp, synthetic construct
  source 1..15: mol_type = other DNA
accaccaattctgat

SEQ ID NO: 9263 - DNA, 15 bp, synthetic construct
  source 1..15: mol_type = other DNA
tccctatcttcgagt

SEQ ID NO: 9264 - DNA, 15 bp, synthetic construct
  source 1..15: mol_type = other DNA
gacgtaactgtggac

SEQ ID NO: 9265 - DNA, 15 bp, synthetic construct
  source 1..15: mol_type = other DNA
gcactgaggtttcgc

SEQ ID NO: 9266 - DNA, 15 bp, synthetic construct
  source 1..15: mol_type = other DNA
tccttggtgtcattg

SEQ ID NO: 9267 - DNA, 15 bp, synthetic construct
  source 1..15: mol_type = other DNA
ggccctaaacgatgg

SEQ ID NO: 9268 - DNA, 15 bp, synthetic construct
  source 1..15: mol_type = other DNA
catgccagagccgta

SEQ ID NO: 9269 - DNA, 15 bp, synthetic construct
  source 1..15: mol_type = other DNA
caggacgtgcgtgtg

SEQ ID NO: 9270 - DNA, 15 bp, synthetic construct
  source 1..15: mol_type = other DNA
aggaggacgttctca

SEQ ID NO: 9271 - DNA, 15 bp, synthetic construct
  source 1..15: mol_type = other DNA
ggaataagccaggtg

SEQ ID NO: 9272 - DNA, 15 bp, synthetic construct
  source 1..15: mol_type = other DNA
gaaggtgccaggtgt

SEQ ID NO: 9273 - DNA, 15 bp, synthetic construct
  source 1..15: mol_type = other DNA
tttgccaatgactcc

SEQ ID NO: 9274 - DNA, 15 bp, synthetic construct
  source 1..15: mol_type = other DNA
aggaatactgttagg

SEQ ID NO: 9275 - DNA, 15 bp, synthetic construct
  source 1..15: mol_type = other DNA
gatgctcagcttcgg

SEQ ID NO: 9276 - DNA, 15 bp, synthetic construct
  source 1..15: mol_type = other DNA
atcgagtcgcaggtc

SEQ ID NO: 9277 - DNA, 15 bp, synthetic construct
  source 1..15: mol_type = other DNA
actggataactcaag

SEQ ID NO: 9278 - DNA, 15 bp, synthetic construct
  source 1..15: mol_type = other DNA
acttacactgcacat

SEQ ID NO: 9279 - DNA, 15 bp, synthetic construct
  source 1..15: mol_type = other DNA
gcgacttcctctccc

SEQ ID NO: 9280 - DNA, 15 bp, synthetic construct
  source 1..15: mol_type = other DNA
aaaggacacactaag

SEQ ID NO: 9281 - DNA, 15 bp, synthetic construct
  source 1..15: mol_type = other DNA
tggtgggacttgcct

SEQ ID NO: 9282 - DNA, 15 bp, synthetic construct
  source 1..15: mol_type = other DNA
tacagtggaagtcat

SEQ ID NO: 9283 - DNA, 15 bp, synthetic construct
  source 1..15: mol_type = other DNA
ccctgaggctccttc

SEQ ID NO: 9284 - DNA, 15 bp, synthetic construct
  source 1..15: mol_type = other DNA
cagtatcctacaagc

SEQ ID NO: 9285 - DNA, 15 bp, synthetic construct
  source 1..15: mol_type = other DNA
cgcaatggctcgctg

SEQ ID NO: 9286 - DNA, 15 bp, synthetic construct
  source 1..15: mol_type = other DNA
cggtatgggcagcac

SEQ ID NO: 9287 - DNA, 15 bp, synthetic construct
  source 1..15: mol_type = other DNA
gtgacctgggcttcc

SEQ ID NO: 9288 - DNA, 15 bp, synthetic construct
  source 1..15: mol_type = other DNA
gcagccggtgaagtt

SEQ ID NO: 9289 - DNA, 15 bp, synthetic construct
  source 1..15: mol_type = other DNA
gcacgacggtgcctg

SEQ ID NO: 9290 - DNA, 15 bp, synthetic construct
  source 1..15: mol_type = other DNA
ggcgtcgaagaggtc

SEQ ID NO: 9291 - DNA, 15 bp, synthetic construct
  source 1..15: mol_type = other DNA
atacatgagaacaca

SEQ ID NO: 9292 - DNA, 15 bp, synthetic construct
  source 1..15: mol_type = other DNA
gacctggcagacttc

SEQ ID NO: 9293 - DNA, 15 bp, synthetic construct
  source 1..15: mol_type = other DNA
ggataagctctgatg

SEQ ID NO: 9294 - DNA, 15 bp, synthetic construct
  source 1..15: mol_type = other DNA
tcattggacctcctc

SEQ ID NO: 9295 - DNA, 15 bp, synthetic construct
  source 1..15: mol_type = other DNA
gaatgtatctgcaat

SEQ ID NO: 9296 - DNA, 15 bp, synthetic construct
  source 1..15: mol_type = other DNA
ctggccggagaatct

SEQ ID NO: 9297 - DNA, 15 bp, synthetic construct
  source 1..15: mol_type = other DNA
aggcctcggtgtcgt

SEQ ID NO: 9298 - DNA, 15 bp, synthetic construct
  source 1..15: mol_type = other DNA
tgcagtggaaatacc

SEQ ID NO: 9299 - DNA, 15 bp, synthetic construct
  source 1..15: mol_type = other DNA
acagtgtcctcaagg

SEQ ID NO: 9300 - DNA, 15 bp, synthetic construct
  source 1..15: mol_type = other DNA
ctagatgagtctctc

SEQ ID NO: 9301 - DNA, 15 bp, synthetic construct
  source 1..15: mol_type = other DNA
cgccgctccacgatc

SEQ ID NO: 9302 - DNA, 15 bp, synthetic construct
  source 1..15: mol_type = other DNA
tccgcagcctctcta

SEQ ID NO: 9303 - DNA, 15 bp, synthetic construct
  source 1..15: mol_type = other DNA
acaggtcccgagtcg

SEQ ID NO: 9304 - DNA, 15 bp, synthetic construct
  source 1..15: mol_type = other DNA
gctcctccatcttga

SEQ ID NO: 9305 - DNA, 15 bp, synthetic construct
  source 1..15: mol_type = other DNA
gacggccgggctttc

SEQ ID NO: 9306 - DNA, 15 bp, synthetic construct
  source 1..15: mol_type = other DNA
aacccatttccttta

SEQ ID NO: 9307 - DNA, 15 bp, synthetic construct
  source 1..15: mol_type = other DNA
gcgagtcaacgagtc

SEQ ID NO: 9308 - DNA, 15 bp, synthetic construct
  source 1..15: mol_type = other DNA
gacgcgcagctctcg

SEQ ID NO: 9309 - DNA, 15 bp, synthetic construct
  source 1..15: mol_type = other DNA
aggcagaagaatagg

SEQ ID NO: 9310 - DNA, 15 bp, synthetic construct
  source 1..15: mol_type = other DNA
gtggtacacgcactc

SEQ ID NO: 9311 - DNA, 15 bp, synthetic construct
  source 1..15: mol_type = other DNA
catggagaagatcgc

SEQ ID NO: 9312 - DNA, 15 bp, synthetic construct
  source 1..15: mol_type = other DNA
tcgtagtcacccttg

SEQ ID NO: 9313 - DNA, 15 bp, synthetic construct
  source 1..15: mol_type = other DNA
gcgacgaattcgtgc

SEQ ID NO: 9314 - DNA, 15 bp, synthetic construct
  source 1..15: mol_type = other DNA
atatgcatgtaccat

SEQ ID NO: 9315 - DNA, 15 bp, synthetic construct
  source 1..15: mol_type = other DNA
aggccgggttgtgtc

SEQ ID NO: 9316 - DNA, 15 bp, synthetic construct
  source 1..15: mol_type = other DNA
ccagaaaggcagtgg

SEQ ID NO: 9317 - DNA, 15 bp, synthetic construct
  source 1..15: mol_type = other DNA
cctaaacccaccatc

SEQ ID NO: 9318 - DNA, 15 bp, synthetic construct
  source 1..15: mol_type = other DNA
gaccgtagtcttctg

SEQ ID NO: 9319 - DNA, 15 bp, synthetic construct
  source 1..15: mol_type = other DNA
ccggcctgaactgcg

SEQ ID NO: 9320 - DNA, 15 bp, synthetic construct
  source 1..15: mol_type = other DNA
cgggcccctttgtcc

SEQ ID NO: 9321 - DNA, 15 bp, synthetic construct
  source 1..15: mol_type = other DNA
caaggagatcagaag

SEQ ID NO: 9322 - DNA, 15 bp, synthetic construct
  source 1..15: mol_type = other DNA
agggcggcttaccat

SEQ ID NO: 9323 - DNA, 15 bp, synthetic construct
  source 1..15: mol_type = other DNA
acagagcccctacgg

SEQ ID NO: 9324 - DNA, 15 bp, synthetic construct
  source 1..15: mol_type = other DNA
gtgccggccaagaag

SEQ ID NO: 9325 - DNA, 15 bp, synthetic construct
  source 1..15: mol_type = other DNA
ggccggcactagtca

SEQ ID NO: 9326 - DNA, 15 bp, synthetic construct
  source 1..15: mol_type = other DNA
gtagagccggtcgat

SEQ ID NO: 9327 - DNA, 15 bp, synthetic construct
  source 1..15: mol_type = other DNA
tcttccatgacatcg

SEQ ID NO: 9328 - DNA, 15 bp, synthetic construct
  source 1..15: mol_type = other DNA
gctgtctgtagtctg

SEQ ID NO: 9329 - DNA, 15 bp, synthetic construct
  source 1..15: mol_type = other DNA
atgcaagttaacact

SEQ ID NO: 9330 - DNA, 15 bp, synthetic construct
  source 1..15: mol_type = other DNA
ggctcgagagttatt

SEQ ID NO: 9331 - DNA, 15 bp, synthetic construct
  source 1..15: mol_type = other DNA
agttctgtctttagg

SEQ ID NO: 9332 - DNA, 15 bp, synthetic construct
  source 1..15: mol_type = other DNA
tctaccccagagaaa

SEQ ID NO: 9333 - DNA, 15 bp, synthetic construct
  source 1..15: mol_type = other DNA
ttctcccatagtcgt

SEQ ID NO: 9334 - DNA, 15 bp, synthetic construct
  source 1..15: mol_type = other DNA
ggcttgactgttgta

SEQ ID NO: 9335 - DNA, 15 bp, synthetic construct
  source 1..15: mol_type = other DNA
cctaccatggaatct

SEQ ID NO: 9336 - DNA, 15 bp, synthetic construct
  source 1..15: mol_type = other DNA
ttaagattgccacct

SEQ ID NO: 9337 - DNA, 15 bp, synthetic construct
  source 1..15: mol_type = other DNA
aaggtcatgaatcag

SEQ ID NO: 9338 - DNA, 15 bp, synthetic construct
  source 1..15: mol_type = other DNA
aggcttttgtgtttt

SEQ ID NO: 9339 - DNA, 15 bp, synthetic construct
  source 1..15: mol_type = other DNA
tgaaagatacagacc

SEQ ID NO: 9340 - DNA, 15 bp, synthetic construct
  source 1..15: mol_type = other DNA
gatgaaagccgccta

SEQ ID NO: 9341 - DNA, 15 bp, synthetic construct
  source 1..15: mol_type = other DNA
caaaatccgtttttg

SEQ ID NO: 9342 - DNA, 15 bp, synthetic construct
  source 1..15: mol_type = other DNA
ccataaagttgtact

SEQ ID NO: 9343 - DNA, 15 bp, synthetic construct
  source 1..15: mol_type = other DNA
gtctgggtctgaaac

SEQ ID NO: 9344 - DNA, 15 bp, synthetic construct
  source 1..15: mol_type = other DNA
gattccctgtttaat

SEQ ID NO: 9345 - DNA, 15 bp, synthetic construct
  source 1..15: mol_type = other DNA
tgtttcagcagattc

SEQ ID NO: 9346 - DNA, 15 bp, synthetic construct
  source 1..15: mol_type = other DNA
gccgttgagctaagg

SEQ ID NO: 9347 - DNA, 15 bp, synthetic construct
  source 1..15: mol_type = other DNA
tgatttcagagagaa

SEQ ID NO: 9348 - DNA, 15 bp, synthetic construct
  source 1..15: mol_type = other DNA
ctagatacaatcagc

SEQ ID NO: 9349 - DNA, 15 bp, synthetic construct
  source 1..15: mol_type = other DNA
tacctgtaattcctg

SEQ ID NO: 9350 - DNA, 15 bp, synthetic construct
  source 1..15: mol_type = other DNA
cgcagtgtgtgttaa

SEQ ID NO: 9351 - DNA, 15 bp, synthetic construct
  source 1..15: mol_type = other DNA
tttataagctatcat

SEQ ID NO: 9352 - DNA, 15 bp, synthetic construct
  source 1..15: mol_type = other DNA
ttcagatgagatccg

SEQ ID NO: 9353 - DNA, 15 bp, synthetic construct
  source 1..15: mol_type = other DNA
ttaaaacgctcatag

SEQ ID NO: 9354 - DNA, 15 bp, synthetic construct
  source 1..15: mol_type = other DNA
tagtccatactttcc

SEQ ID NO: 9355 - DNA, 15 bp, synthetic construct
  source 1..15: mol_type = other DNA
ctttagccaagcaga

SEQ ID NO: 9356 - DNA, 15 bp, synthetic construct
  source 1..15: mol_type = other DNA
aaaagtccagatacg

SEQ ID NO: 9357 - DNA, 15 bp, synthetic construct
  source 1..15: mol_type = other DNA
acagaagagagtgcc

SEQ ID NO: 9358 - DNA, 15 bp, synthetic construct
  source 1..15: mol_type = other DNA
acctccgacgagagt

SEQ ID NO: 9359 - DNA, 15 bp, synthetic construct
  source 1..15: mol_type = other DNA
atgatgggctgtctt

SEQ ID NO: 9360 - DNA, 15 bp, synthetic construct
  source 1..15: mol_type = other DNA
tgagcctttacactc

SEQ ID NO: 9361 - DNA, 15 bp, synthetic construct
  source 1..15: mol_type = other DNA
gtaaaggcttgcttt

SEQ ID NO: 9362 - DNA, 15 bp, synthetic construct
  source 1..15: mol_type = other DNA
tttgtttcctctctt

SEQ ID NO: 9363 - DNA, 15 bp, synthetic construct
  source 1..15: mol_type = other DNA
cagagcgagggtcag

SEQ ID NO: 9364 - DNA, 15 bp, synthetic construct
  source 1..15: mol_type = other DNA
gagttattacagaca

SEQ ID NO: 9365 - DNA, 15 bp, synthetic construct
  source 1..15: mol_type = other DNA
cactactcgtttcat

SEQ ID NO: 9366 - DNA, 15 bp, synthetic construct
  source 1..15: mol_type = other DNA
atttttcgtcttgtg

SEQ ID NO: 9367 - DNA, 15 bp, synthetic construct
  source 1..15: mol_type = other DNA
aggcttctcaaagtg

SEQ ID NO: 9368 - DNA, 15 bp, synthetic construct
  source 1..15: mol_type = other DNA
tttctaatagttggg

SEQ ID NO: 9369 - DNA, 15 bp, synthetic construct
  source 1..15: mol_type = other DNA
gatctaaaagagagc

SEQ ID NO: 9370 - DNA, 15 bp, synthetic construct
  source 1..15: mol_type = other DNA
ataaacctcgtggat

SEQ ID NO: 9371 - DNA, 15 bp, synthetic construct
  source 1..15: mol_type = other DNA
gaaattttcccaacc

SEQ ID NO: 9372 - DNA, 15 bp, synthetic construct
  source 1..15: mol_type = other DNA
aaaccacacactaac

SEQ ID NO: 9373 - DNA, 15 bp, synthetic construct
  source 1..15: mol_type = other DNA
gacaaagttgcaaaa

SEQ ID NO: 9374 - DNA, 15 bp, synthetic construct
  source 1..15: mol_type = other DNA
cttgactttcattgc

SEQ ID NO: 9375 - DNA, 15 bp, synthetic construct
  source 1..15: mol_type = other DNA
caagtggactgattc

SEQ ID NO: 9376 - DNA, 15 bp, synthetic construct
  source 1..15: mol_type = other DNA
ggatgttccacaaac

SEQ ID NO: 9377 - DNA, 15 bp, synthetic construct
  source 1..15: mol_type = other DNA
cctatctaaacagta

SEQ ID NO: 9378 - DNA, 15 bp, synthetic construct
  source 1..15: mol_type = other DNA
tgtctccaactaaga

SEQ ID NO: 9379 - DNA, 15 bp, synthetic construct
  source 1..15: mol_type = other DNA
attcacctcacaggg

SEQ ID NO: 9380 - DNA, 15 bp, synthetic construct
  source 1..15: mol_type = other DNA
gtacaatgccgatcc

SEQ ID NO: 9381 - DNA, 15 bp, synthetic construct
  source 1..15: mol_type = other DNA
ttgctttaagttgcc

SEQ ID NO: 9382 - DNA, 15 bp, synthetic construct
  source 1..15: mol_type = other DNA
ccttgttcttttaca

SEQ ID NO: 9383 - DNA, 15 bp, synthetic construct
  source 1..15: mol_type = other DNA
aggacaagttgcaca

SEQ ID NO: 9384 - DNA, 15 bp, synthetic construct
  source 1..15: mol_type = other DNA
gtaaggtaaatttag

SEQ ID NO: 9385 - DNA, 15 bp, synthetic construct
  source 1..15: mol_type = other DNA
ctaaagtcaatctct

SEQ ID NO: 9386 - DNA, 15 bp, synthetic construct
  source 1..15: mol_type = other DNA
ctcagtttggtagtg

SEQ ID NO: 9387 - DNA, 15 bp, synthetic construct
  source 1..15: mol_type = other DNA
gattcccagtcacca

SEQ ID NO: 9388 - DNA, 15 bp, synthetic construct
  source 1..15: mol_type = other DNA
gctatttggcactcc

SEQ ID NO: 9389 - DNA, 15 bp, synthetic construct
  source 1..15: mol_type = other DNA
catctctttttgtct

SEQ ID NO: 9390 - DNA, 15 bp, synthetic construct
  source 1..15: mol_type = other DNA
atcaacttggcagga

SEQ ID NO: 9391 - DNA, 15 bp, synthetic construct
  source 1..15: mol_type = other DNA
tctagaaccatcgcc

SEQ ID NO: 9392 - DNA, 15 bp, synthetic construct
  source 1..15: mol_type = other DNA
acagacattggtcac

SEQ ID NO: 9393 - DNA, 15 bp, synthetic construct
  source 1..15: mol_type = other DNA
cctctctcatctgcc

SEQ ID NO: 9394 - DNA, 15 bp, synthetic construct
  source 1..15: mol_type = other DNA
ttaaagaggatggag

SEQ ID NO: 9395 - DNA, 15 bp, synthetic construct
  source 1..15: mol_type = other DNA
taacacgggctagtc

SEQ ID NO: 9396 - DNA, 15 bp, synthetic construct
  source 1..15: mol_type = other DNA
agctcggctacctag

SEQ ID NO: 9397 - DNA, 15 bp, synthetic construct
  source 1..15: mol_type = other DNA
acctggtcctctata

SEQ ID NO: 9398 - DNA, 15 bp, synthetic construct
  source 1..15: mol_type = other DNA
agtgtcctcggtaat

SEQ ID NO: 9399 - DNA, 15 bp, synthetic construct
  source 1..15: mol_type = other DNA
acctggtcctctata

SEQ ID NO: 9400 - DNA, 15 bp, synthetic construct
  source 1..15: mol_type = other DNA
agtgtcctcggtaat

SEQ ID NO: 9401 - DNA, 15 bp, synthetic construct
  source 1..15: mol_type = other DNA
cctgatggtaaccgg

SEQ ID NO: 9402 - DNA, 15 bp, synthetic construct
  source 1..15: mol_type = other DNA
aaactctacaaggac

SEQ ID NO: 9403 - DNA, 15 bp, synthetic construct
  source 1..15: mol_type = other DNA
gccggccgccttagc

SEQ ID NO: 9404 - DNA, 15 bp, synthetic construct
  source 1..15: mol_type = other DNA
acgtagagagaggtg

SEQ ID NO: 9405 - DNA, 15 bp, synthetic construct
  source 1..15: mol_type = other DNA
tcctcccggtgtaca

SEQ ID NO: 9406 - DNA, 15 bp, synthetic construct
  source 1..15: mol_type = other DNA
gatgcggagggacct

SEQ ID NO: 9407 - DNA, 15 bp, synthetic construct
  source 1..15: mol_type = other DNA
aggttggacactggc

SEQ ID NO: 9408 - DNA, 15 bp, synthetic construct
  source 1..15: mol_type = other DNA
ctgacctaggaatag

SEQ ID NO: 9409 - DNA, 15 bp, synthetic construct
  source 1..15: mol_type = other DNA
atgaagccatccttg

SEQ ID NO: 9410 - DNA, 15 bp, synthetic construct
  source 1..15: mol_type = other DNA
ttcaactagggacta

SEQ ID NO: 9411 - DNA, 15 bp, synthetic construct
  source 1..15: mol_type = other DNA
ccataccatagtccc

SEQ ID NO: 9412 - DNA, 15 bp, synthetic construct
  source 1..15: mol_type = other DNA
aaatgtgtcctggtg

SEQ ID NO: 9413 - DNA, 15 bp, synthetic construct
  source 1..15: mol_type = other DNA
ctcccagtgacaaca

SEQ ID NO: 9414 - DNA, 15 bp, synthetic construct
  source 1..15: mol_type = other DNA
ctctgccctgtccga

SEQ ID NO: 9415 - DNA, 15 bp, synthetic construct
  source 1..15: mol_type = other DNA
acaccctttttcact

SEQ ID NO: 9416 - DNA, 15 bp, synthetic construct
  source 1..15: mol_type = other DNA
ccttccgataggaca

SEQ ID NO: 9417 - DNA, 15 bp, synthetic construct
  source 1..15: mol_type = other DNA
tgtccttccctttgc

SEQ ID NO: 9418 - DNA, 15 bp, synthetic construct
  source 1..15: mol_type = other DNA
cagggctgagtgagt

SEQ ID NO: 9419 - DNA, 15 bp, synthetic construct
  source 1..15: mol_type = other DNA
gttcaatttttcccg

SEQ ID NO: 9420 - DNA, 15 bp, synthetic construct
  source 1..15: mol_type = other DNA
tctagctaactgggt

SEQ ID NO: 9421 - DNA, 15 bp, synthetic construct
  source 1..15: mol_type = other DNA
gagtcactgacatgt

SEQ ID NO: 9422 - DNA, 15 bp, synthetic construct
  source 1..15: mol_type = other DNA
gatgtcagcatcttc

SEQ ID NO: 9423 - DNA, 15 bp, synthetic construct
  source 1..15: mol_type = other DNA
gcatctcccctaaca

SEQ ID NO: 9424 - DNA, 15 bp, synthetic construct
  source 1..15: mol_type = other DNA
gaccgctgaatgaat

SEQ ID NO: 9425 - DNA, 15 bp, synthetic construct
  source 1..15: mol_type = other DNA
caagaagaagttgga

SEQ ID NO: 9426 - DNA, 15 bp, synthetic construct
  source 1..15: mol_type = other DNA
ggaagtaggtgaagg

SEQ ID NO: 9427 - DNA, 15 bp, synthetic construct
  source 1..15: mol_type = other DNA
tatggcgaggagtat

SEQ ID NO: 9428 - DNA, 15 bp, synthetic construct
  source 1..15: mol_type = other DNA
cagtctccaccaact

SEQ ID NO: 9429 - DNA, 15 bp, synthetic construct
  source 1..15: mol_type = other DNA
tatggcgaggagtat

SEQ ID NO: 9430 - DNA, 15 bp, synthetic construct
  source 1..15: mol_type = other DNA
cagtctccaccaact

SEQ ID NO: 9431 - DNA, 15 bp, synthetic construct
  source 1..15: mol_type = other DNA
cgctgggtaaactac

SEQ ID NO: 9432 - DNA, 15 bp, synthetic construct
  source 1..15: mol_type = other DNA
gagcctgcacaggag

SEQ ID NO: 9433 - DNA, 15 bp, synthetic construct
  source 1..15: mol_type = other DNA
ggtcccgacgctctg

SEQ ID NO: 9434 - DNA, 15 bp, synthetic construct
  source 1..15: mol_type = other DNA
agctctgccaggaag

SEQ ID NO: 9435 - DNA, 15 bp, synthetic construct
  source 1..15: mol_type = other DNA
gggctataccttccc

SEQ ID NO: 9436 - DNA, 15 bp, synthetic construct
  source 1..15: mol_type = other DNA
atgacatcccgacac

SEQ ID NO: 9437 - DNA, 15 bp, synthetic construct
  source 1..15: mol_type = other DNA
gtctcatgccatcct

SEQ ID NO: 9438 - DNA, 15 bp, synthetic construct
  source 1..15: mol_type = other DNA
taaaggactcaacag

SEQ ID NO: 9439 - DNA, 15 bp, synthetic construct
  source 1..15: mol_type = other DNA
gcttgttgctattcc

SEQ ID NO: 9440 - DNA, 15 bp, synthetic construct
  source 1..15: mol_type = other DNA
gtctggattttctgc

SEQ ID NO: 9441 - DNA, 15 bp, synthetic construct
  source 1..15: mol_type = other DNA
tatgtgctagaggtg

SEQ ID NO: 9442 - DNA, 15 bp, synthetic construct
  source 1..15: mol_type = other DNA
ttacagggagaaggc

SEQ ID NO: 9443 - DNA, 15 bp, synthetic construct
  source 1..15: mol_type = other DNA
tctcttcctagtctg

SEQ ID NO: 9444 - DNA, 15 bp, synthetic construct
  source 1..15: mol_type = other DNA
gatctcctcaccatc

SEQ ID NO: 9445 - DNA, 15 bp, synthetic construct
  source 1..15: mol_type = other DNA
ggatcctgtattgtg

SEQ ID NO: 9446 - DNA, 15 bp, synthetic construct
  source 1..15: mol_type = other DNA
agtggttctcctgat

SEQ ID NO: 9447 - DNA, 15 bp, synthetic construct
  source 1..15: mol_type = other DNA
tgtccgagtacacgt

SEQ ID NO: 9448 - DNA, 15 bp, synthetic construct
  source 1..15: mol_type = other DNA
gtcggcaatgagaca

SEQ ID NO: 9449 - DNA, 15 bp, synthetic construct
  source 1..15: mol_type = other DNA
aggtggaaagtcatg

SEQ ID NO: 9450 - DNA, 15 bp, synthetic construct
  source 1..15: mol_type = other DNA
ccatagggattccga

SEQ ID NO: 9451 - DNA, 15 bp, synthetic construct
  source 1..15: mol_type = other DNA
cactcctggcctgtg

SEQ ID NO: 9452 - DNA, 15 bp, synthetic construct
  source 1..15: mol_type = other DNA
cagcggcttcttcgt

SEQ ID NO: 9453 - DNA, 15 bp, synthetic construct
  source 1..15: mol_type = other DNA
gtgggacagggtacg

SEQ ID NO: 9454 - DNA, 15 bp, synthetic construct
  source 1..15: mol_type = other DNA
gtgcttgtgccagtc

SEQ ID NO: 9455 - DNA, 15 bp, synthetic construct
  source 1..15: mol_type = other DNA
ctgcttacctgtctc

SEQ ID NO: 9456 - DNA, 15 bp, synthetic construct
  source 1..15: mol_type = other DNA
taactggcagcatcg

SEQ ID NO: 9457 - DNA, 15 bp, synthetic construct
  source 1..15: mol_type = other DNA
tcggctcagtctacc

SEQ ID NO: 9458 - DNA, 15 bp, synthetic construct
  source 1..15: mol_type = other DNA
ctgtagaaggtttca

SEQ ID NO: 9459 - DNA, 15 bp, synthetic construct
  source 1..15: mol_type = other DNA
gttggacatgacttt

SEQ ID NO: 9460 - DNA, 15 bp, synthetic construct
  source 1..15: mol_type = other DNA
cagttccctccgtat

SEQ ID NO: 9461 - DNA, 15 bp, synthetic construct
  source 1..15: mol_type = other DNA
cctatgtccctatgt

SEQ ID NO: 9462 - DNA, 15 bp, synthetic construct
  source 1..15: mol_type = other DNA
cacattaatgaagag

SEQ ID NO: 9463 - DNA, 15 bp, synthetic construct
  source 1..15: mol_type = other DNA
cagccacgagtaatg

SEQ ID NO: 9464 - DNA, 15 bp, synthetic construct
  source 1..15: mol_type = other DNA
ttctcccattctttc

SEQ ID NO: 9465 - DNA, 15 bp, synthetic construct
  source 1..15: mol_type = other DNA
gtggccggtccttct

SEQ ID NO: 9466 - DNA, 15 bp, synthetic construct
  source 1..15: mol_type = other DNA
atgttcaatgaccct

SEQ ID NO: 9467 - DNA, 15 bp, synthetic construct
  source 1..15: mol_type = other DNA
gggtaccggagatgc

SEQ ID NO: 9468 - DNA, 15 bp, synthetic construct
  source 1..15: mol_type = other DNA
atgttttatttattg

SEQ ID NO: 9469 - DNA, 15 bp, synthetic construct
  source 1..15: mol_type = other DNA
gatctgtcaacccag

SEQ ID NO: 9470 - DNA, 15 bp, synthetic construct
  source 1..15: mol_type = other DNA
ctttgccatcatcca

SEQ ID NO: 9471 - DNA, 15 bp, synthetic construct
  source 1..15: mol_type = other DNA
gggttttgatcaata

SEQ ID NO: 9472 - DNA, 15 bp, synthetic construct
  source 1..15: mol_type = other DNA
ttgatagagaactgt

SEQ ID NO: 9473 - DNA, 15 bp, synthetic construct
  source 1..15: mol_type = other DNA
tcagcaaacttcaag

SEQ ID NO: 9474 - DNA, 15 bp, synthetic construct
  source 1..15: mol_type = other DNA
tgtcctcttaaatgc

SEQ ID NO: 9475 - DNA, 15 bp, synthetic construct
  source 1..15: mol_type = other DNA
gaccctcttagctca

SEQ ID NO: 9476 - DNA, 15 bp, synthetic construct
  source 1..15: mol_type = other DNA
cacaagtaactggac

SEQ ID NO: 9477 - DNA, 15 bp, synthetic construct
  source 1..15: mol_type = other DNA
aacacccatggagag

SEQ ID NO: 9478 - DNA, 15 bp, synthetic construct
  source 1..15: mol_type = other DNA
cctcccatcatacaa

SEQ ID NO: 9479 - DNA, 15 bp, synthetic construct
  source 1..15: mol_type = other DNA
cctcaccgtgtatga

SEQ ID NO: 9480 - DNA, 15 bp, synthetic construct
  source 1..15: mol_type = other DNA
tctgagccagtccga

SEQ ID NO: 9481 - DNA, 15 bp, synthetic construct
  source 1..15: mol_type = other DNA
ctcatctccctccac

SEQ ID NO: 9482 - DNA, 15 bp, synthetic construct
  source 1..15: mol_type = other DNA
gatgaggtgttctgg

SEQ ID NO: 9483 - DNA, 15 bp, synthetic construct
  source 1..15: mol_type = other DNA
ccctcacctttccgc

SEQ ID NO: 9484 - DNA, 15 bp, synthetic construct
  source 1..15: mol_type = other DNA
cacttcccctgagag

SEQ ID NO: 9485 - DNA, 15 bp, synthetic construct
  source 1..15: mol_type = other DNA
ctgccctaaaaacga

SEQ ID NO: 9486 - DNA, 15 bp, synthetic construct
  source 1..15: mol_type = other DNA
agactcgagcatccg

SEQ ID NO: 9487 - DNA, 15 bp, synthetic construct
  source 1..15: mol_type = other DNA
ggcgtgcatcttagc

SEQ ID NO: 9488 - DNA, 15 bp, synthetic construct
  source 1..15: mol_type = other DNA
tgaccacacgcatcg

SEQ ID NO: 9489 - DNA, 15 bp, synthetic construct
  source 1..15: mol_type = other DNA
tacaggtgaagtggg

SEQ ID NO: 9490 - DNA, 15 bp, synthetic construct
  source 1..15: mol_type = other DNA
gtgctctacatgtcg

SEQ ID NO: 9491 - DNA, 15 bp, synthetic construct
  source 1..15: mol_type = other DNA
tacaggtgaagtggg

SEQ ID NO: 9492 - DNA, 15 bp, synthetic construct
  source 1..15: mol_type = other DNA
gtgctctacatgtcg

SEQ ID NO: 9493 - DNA, 15 bp, synthetic construct
  source 1..15: mol_type = other DNA
aaccagatgaggtcc

SEQ ID NO: 9494 - DNA, 15 bp, synthetic construct
  source 1..15: mol_type = other DNA
ccctggtagctcctc

SEQ ID NO: 9495 - DNA, 15 bp, synthetic construct
  source 1..15: mol_type = other DNA
accacaggtctcagc

SEQ ID NO: 9496 - DNA, 15 bp, synthetic construct
  source 1..15: mol_type = other DNA
ctggtactcaaggca

SEQ ID NO: 9497 - DNA, 15 bp, synthetic construct
  source 1..15: mol_type = other DNA
ccgcctttgtccagc

SEQ ID NO: 9498 - DNA, 15 bp, synthetic construct
  source 1..15: mol_type = other DNA
gggatgtgtcctgtg

SEQ ID NO: 9499 - DNA, 15 bp, synthetic construct
  source 1..15: mol_type = other DNA
acactacaacgaagg

SEQ ID NO: 9500 - DNA, 15 bp, synthetic construct
  source 1..15: mol_type = other DNA
aggacagcaaacaag

SEQ ID NO: 9501 - DNA, 15 bp, synthetic construct
  source 1..15: mol_type = other DNA
gcgcggagcttgtag

SEQ ID NO: 9502 - DNA, 15 bp, synthetic construct
  source 1..15: mol_type = other DNA
cctccttgcaggaaa

SEQ ID NO: 9503 - DNA, 15 bp, synthetic construct
  source 1..15: mol_type = other DNA
ctcactgctcaggac

SEQ ID NO: 9504 - DNA, 15 bp, synthetic construct
  source 1..15: mol_type = other DNA
caggcctcgactgga

SEQ ID NO: 9505 - DNA, 15 bp, synthetic construct
  source 1..15: mol_type = other DNA
tccagcccttgtcgt

SEQ ID NO: 9506 - DNA, 15 bp, synthetic construct
  source 1..15: mol_type = other DNA
ccaaggcggagaatc

SEQ ID NO: 9507 - DNA, 15 bp, synthetic construct
  source 1..15: mol_type = other DNA
agctgtccttggagc

SEQ ID NO: 9508 - DNA, 15 bp, synthetic construct
  source 1..15: mol_type = other DNA
agcggcgtttctgct

SEQ ID NO: 9509 - DNA, 15 bp, synthetic construct
  source 1..15: mol_type = other DNA
aatccagcttgtgag

SEQ ID NO: 9510 - DNA, 15 bp, synthetic construct
  source 1..15: mol_type = other DNA
gtcagactggtgaag

SEQ ID NO: 9511 - DNA, 15 bp, synthetic construct
  source 1..15: mol_type = other DNA
ctccaggcctcttac

SEQ ID NO: 9512 - DNA, 15 bp, synthetic construct
  source 1..15: mol_type = other DNA
ctccccagtcccgtt

SEQ ID NO: 9513 - DNA, 15 bp, synthetic construct
  source 1..15: mol_type = other DNA
ctgtcagggtggagg

SEQ ID NO: 9514 - DNA, 15 bp, synthetic construct
  source 1..15: mol_type = other DNA
cactttgcctacacc

SEQ ID NO: 9515 - DNA, 15 bp, synthetic construct
  source 1..15: mol_type = other DNA
tcatctgctctctgg

SEQ ID NO: 9516 - DNA, 15 bp, synthetic construct
  source 1..15: mol_type = other DNA
acgtgctggaactct

SEQ ID NO: 9517 - DNA, 15 bp, synthetic construct
  source 1..15: mol_type = other DNA
tcatctgctctctgg

SEQ ID NO: 9518 - DNA, 15 bp, synthetic construct
  source 1..15: mol_type = other DNA
acgtgctggaactct

SEQ ID NO: 9519 - DNA, 15 bp, synthetic construct
  source 1..15: mol_type = other DNA
gtcattggcgtgctg

SEQ ID NO: 9520 - DNA, 15 bp, synthetic construct
  source 1..15: mol_type = other DNA
atcccggtcccctga

SEQ ID NO: 9521 - DNA, 15 bp, synthetic construct
  source 1..15: mol_type = other DNA
gtcattggcgtgctg

SEQ ID NO: 9522 - DNA, 15 bp, synthetic construct
  source 1..15: mol_type = other DNA
atcccggtcccctga

SEQ ID NO: 9523 - DNA, 15 bp, synthetic construct
  source 1..15: mol_type = other DNA
gtgtcaacgtaggca

SEQ ID NO: 9524 - DNA, 15 bp, synthetic construct
  source 1..15: mol_type = other DNA
gagccagttgaagat

SEQ ID NO: 9525 - DNA, 15 bp, synthetic construct
  source 1..15: mol_type = other DNA
gtgtcaacgtaggca

SEQ ID NO: 9526 - DNA, 15 bp, synthetic construct
  source 1..15: mol_type = other DNA
gagccagttgaagat

SEQ ID NO: 9527 - DNA, 15 bp, synthetic construct
  source 1..15: mol_type = other DNA
ggtgagttgtgggtg

SEQ ID NO: 9528 - DNA, 15 bp, synthetic construct
  source 1..15: mol_type = other DNA
accttgaggatgtcg

SEQ ID NO: 9529 - DNA, 15 bp, synthetic construct
  source 1..15: mol_type = other DNA
tggagaggctaagtg

SEQ ID NO: 9530 - DNA, 15 bp, synthetic construct
  source 1..15: mol_type = other DNA
tgaccctccatcagg

SEQ ID NO: 9531 - DNA, 15 bp, synthetic construct
  source 1..15: mol_type = other DNA
tgagtcctgagagag

SEQ ID NO: 9532 - DNA, 15 bp, synthetic construct
  source 1..15: mol_type = other DNA
ctcaggacaggctca

SEQ ID NO: 9533 - DNA, 15 bp, synthetic construct
  source 1..15: mol_type = other DNA
acctgctgagtcatc

SEQ ID NO: 9534 - DNA, 15 bp, synthetic construct
  source 1..15: mol_type = other DNA
gctgttcctctccat

SEQ ID NO: 9535 - DNA, 15 bp, synthetic construct
  source 1..15: mol_type = other DNA
gagaggaacagcaca

SEQ ID NO: 9536 - DNA, 15 bp, synthetic construct
  source 1..15: mol_type = other DNA
cagcttgactatgag

SEQ ID NO: 9537 - DNA, 15 bp, synthetic construct
  source 1..15: mol_type = other DNA
ccgccacctgtttgc

SEQ ID NO: 9538 - DNA, 15 bp, synthetic construct
  source 1..15: mol_type = other DNA
ggtagcccccgagtc

SEQ ID NO: 9539 - DNA, 15 bp, synthetic construct
  source 1..15: mol_type = other DNA
accaggctgactcgg

SEQ ID NO: 9540 - DNA, 15 bp, synthetic construct
  source 1..15: mol_type = other DNA
ctgggagtcaccaca

SEQ ID NO: 9541 - DNA, 15 bp, synthetic construct
  source 1..15: mol_type = other DNA
gtcgtgcccctcatg

SEQ ID NO: 9542 - DNA, 15 bp, synthetic construct
  source 1..15: mol_type = other DNA
ggaagctggccagtt

SEQ ID NO: 9543 - DNA, 15 bp, synthetic construct
  source 1..15: mol_type = other DNA
gtcgtgcccctcatg

SEQ ID NO: 9544 - DNA, 15 bp, synthetic construct
  source 1..15: mol_type = other DNA
ggaagctggccagtt

SEQ ID NO: 9545 - DNA, 15 bp, synthetic construct
  source 1..15: mol_type = other DNA
gaacttcagacttgg

SEQ ID NO: 9546 - DNA, 15 bp, synthetic construct
  source 1..15: mol_type = other DNA
ccgagcagcaggtag

SEQ ID NO: 9547 - DNA, 15 bp, synthetic construct
  source 1..15: mol_type = other DNA
ggccaggcacttcgg

SEQ ID NO: 9548 - DNA, 15 bp, synthetic construct
  source 1..15: mol_type = other DNA
agggctccagagaat

SEQ ID NO: 9549 - DNA, 15 bp, synthetic construct
  source 1..15: mol_type = other DNA
tggtgctcctcgtca

SEQ ID NO: 9550 - DNA, 15 bp, synthetic construct
  source 1..15: mol_type = other DNA
caactgcccgtcaca

SEQ ID NO: 9551 - DNA, 15 bp, synthetic construct
  source 1..15: mol_type = other DNA
actgctacgagaacc

SEQ ID NO: 9552 - DNA, 15 bp, synthetic construct
  source 1..15: mol_type = other DNA
cagcctggtttattt

SEQ ID NO: 9553 - DNA, 15 bp, synthetic construct
  source 1..15: mol_type = other DNA
gtgcaatttcacaaa

SEQ ID NO: 9554 - DNA, 15 bp, synthetic construct
  source 1..15: mol_type = other DNA
gtacattcagattca

SEQ ID NO: 9555 - DNA, 15 bp, synthetic construct
  source 1..15: mol_type = other DNA
atagaaacctgtact

SEQ ID NO: 9556 - DNA, 15 bp, synthetic construct
  source 1..15: mol_type = other DNA
aacagtgcccaatct

SEQ ID NO: 9557 - DNA, 15 bp, synthetic construct
  source 1..15: mol_type = other DNA
acttccagtcggtaa

SEQ ID NO: 9558 - DNA, 15 bp, synthetic construct
  source 1..15: mol_type = other DNA
acaaatgagaaatag

SEQ ID NO: 9559 - DNA, 15 bp, synthetic construct
  source 1..15: mol_type = other DNA
ataccaatgacacag

SEQ ID NO: 9560 - DNA, 15 bp, synthetic construct
  source 1..15: mol_type = other DNA
ctgcttcattcatcg

SEQ ID NO: 9561 - DNA, 15 bp, synthetic construct
  source 1..15: mol_type = other DNA
aagtgaccggtgatg

SEQ ID NO: 9562 - DNA, 15 bp, synthetic construct
  source 1..15: mol_type = other DNA
aagaacaaggtcaca

SEQ ID NO: 9563 - DNA, 15 bp, synthetic construct
  source 1..15: mol_type = other DNA
tccttcaggtgaaaa

SEQ ID NO: 9564 - DNA, 15 bp, synthetic construct
  source 1..15: mol_type = other DNA
tttctcttgctctag

SEQ ID NO: 9565 - DNA, 15 bp, synthetic construct
  source 1..15: mol_type = other DNA
ttttggccgtattgg

SEQ ID NO: 9566 - DNA, 15 bp, synthetic construct
  source 1..15: mol_type = other DNA
aggaaaacatccttg

SEQ ID NO: 9567 - DNA, 15 bp, synthetic construct
  source 1..15: mol_type = other DNA
ttactccatagctga

SEQ ID NO: 9568 - DNA, 15 bp, synthetic construct
  source 1..15: mol_type = other DNA
aacatccagcctatt

SEQ ID NO: 9569 - DNA, 15 bp, synthetic construct
  source 1..15: mol_type = other DNA
aagcaagtaagaaat

SEQ ID NO: 9570 - DNA, 15 bp, synthetic construct
  source 1..15: mol_type = other DNA
gaatctataattact

SEQ ID NO: 9571 - DNA, 15 bp, synthetic construct
  source 1..15: mol_type = other DNA
ggcgcccatcatgtc

SEQ ID NO: 9572 - DNA, 15 bp, synthetic construct
  source 1..15: mol_type = other DNA
atgaagatgagagac

SEQ ID NO: 9573 - DNA, 15 bp, synthetic construct
  source 1..15: mol_type = other DNA
tgaaataccctctgt

SEQ ID NO: 9574 - DNA, 15 bp, synthetic construct
  source 1..15: mol_type = other DNA
cactatagtttggga

SEQ ID NO: 9575 - DNA, 15 bp, synthetic construct
  source 1..15: mol_type = other DNA
aagaccttgtaatga

SEQ ID NO: 9576 - DNA, 15 bp, synthetic construct
  source 1..15: mol_type = other DNA
gcttttctatctata

SEQ ID NO: 9577 - DNA, 15 bp, synthetic construct
  source 1..15: mol_type = other DNA
tgcattccatgtgtg

SEQ ID NO: 9578 - DNA, 15 bp, synthetic construct
  source 1..15: mol_type = other DNA
aactaacatgtcgga

SEQ ID NO: 9579 - DNA, 15 bp, synthetic construct
  source 1..15: mol_type = other DNA
agtctatatgaggtt

SEQ ID NO: 9580 - DNA, 15 bp, synthetic construct
  source 1..15: mol_type = other DNA
gagtcacacgcagat

SEQ ID NO: 9581 - DNA, 15 bp, synthetic construct
  source 1..15: mol_type = other DNA
atgtgacactgcatg

SEQ ID NO: 9582 - DNA, 15 bp, synthetic construct
  source 1..15: mol_type = other DNA
agaagagctacgaat

SEQ ID NO: 9583 - DNA, 15 bp, synthetic construct
  source 1..15: mol_type = other DNA
aacaacatttcttca

SEQ ID NO: 9584 - DNA, 15 bp, synthetic construct
  source 1..15: mol_type = other DNA
ggaaatcagacttca

SEQ ID NO: 9585 - DNA, 15 bp, synthetic construct
  source 1..15: mol_type = other DNA
tcagatttgggtcaa

SEQ ID NO: 9586 - DNA, 15 bp, synthetic construct
  source 1..15: mol_type = other DNA
aaaagagcagctgat

SEQ ID NO: 9587 - DNA, 15 bp, synthetic construct
  source 1..15: mol_type = other DNA
ctgggcatatatgat

SEQ ID NO: 9588 - DNA, 15 bp, synthetic construct
  source 1..15: mol_type = other DNA
ctttctaatggatca

SEQ ID NO: 9589 - DNA, 15 bp, synthetic construct
  source 1..15: mol_type = other DNA
gggcttctttttctt

SEQ ID NO: 9590 - DNA, 15 bp, synthetic construct
  source 1..15: mol_type = other DNA
gatcactcgcatctc

SEQ ID NO: 9591 - DNA, 15 bp, synthetic construct
  source 1..15: mol_type = other DNA
ccccgtacctggaag

SEQ ID NO: 9592 - DNA, 15 bp, synthetic construct
  source 1..15: mol_type = other DNA
cgccctcgccctcga

SEQ ID NO: 9593 - DNA, 15 bp, synthetic construct
  source 1..15: mol_type = other DNA
agttgggagtgcgag

SEQ ID NO: 9594 - DNA, 15 bp, synthetic construct
  source 1..15: mol_type = other DNA
ggcgaaagtttaacg

SEQ ID NO: 9595 - DNA, 15 bp, synthetic construct
  source 1..15: mol_type = other DNA
cgttaaactttcgcc

SEQ ID NO: 9596 - DNA, 15 bp, synthetic construct
  source 1..15: mol_type = other DNA
ttgtaaaagctgaca

SEQ ID NO: 9597 - DNA, 15 bp, synthetic construct
  source 1..15: mol_type = other DNA
tttcccttgtgtttc

SEQ ID NO: 9598 - DNA, 15 bp, synthetic construct
  source 1..15: mol_type = other DNA
tttcttttgccaaac

SEQ ID NO: 9599 - DNA, 15 bp, synthetic construct
  source 1..15: mol_type = other DNA
ccatttcagtagaag

SEQ ID NO: 9600 - DNA, 15 bp, synthetic construct
  source 1..15: mol_type = other DNA
aaagaggaaacagaa

SEQ ID NO: 9601 - DNA, 15 bp, synthetic construct
  source 1..15: mol_type = other DNA
tgaaatttgctttat

SEQ ID NO: 9602 - DNA, 15 bp, synthetic construct
  source 1..15: mol_type = other DNA
tacagaaactaagcc

SEQ ID NO: 9603 - DNA, 15 bp, synthetic construct
  source 1..15: mol_type = other DNA
cactggtaagatggc

SEQ ID NO: 9604 - DNA, 15 bp, synthetic construct
  source 1..15: mol_type = other DNA
gcagaaatcaaataa

SEQ ID NO: 9605 - DNA, 15 bp, synthetic construct
  source 1..15: mol_type = other DNA
gaaagttctgaaaca

SEQ ID NO: 9606 - DNA, 15 bp, synthetic construct
  source 1..15: mol_type = other DNA
agcaatcacacaata

SEQ ID NO: 9607 - DNA, 15 bp, synthetic construct
  source 1..15: mol_type = other DNA
gcacctgacgatgtt

SEQ ID NO: 9608 - DNA, 15 bp, synthetic construct
  source 1..15: mol_type = other DNA
tttagaagacaaaca

SEQ ID NO: 9609 - DNA, 15 bp, synthetic construct
  source 1..15: mol_type = other DNA
agagaacttgttcct

SEQ ID NO: 9610 - DNA, 15 bp, synthetic construct
  source 1..15: mol_type = other DNA
tctttcaagggtact

SEQ ID NO: 9611 - DNA, 15 bp, synthetic construct
  source 1..15: mol_type = other DNA
ttaaccatgttccag

SEQ ID NO: 9612 - DNA, 15 bp, synthetic construct
  source 1..15: mol_type = other DNA
ttctatttgcactct

SEQ ID NO: 9613 - DNA, 15 bp, synthetic construct
  source 1..15: mol_type = other DNA
attaatgcttttcta

SEQ ID NO: 9614 - DNA, 15 bp, synthetic construct
  source 1..15: mol_type = other DNA
tcccctttacaaata

SEQ ID NO: 9615 - DNA, 15 bp, synthetic construct
  source 1..15: mol_type = other DNA
agctcagctatggta

SEQ ID NO: 9616 - DNA, 15 bp, synthetic construct
  source 1..15: mol_type = other DNA
cagactactttgtca

SEQ ID NO: 9617 - DNA, 15 bp, synthetic construct
  source 1..15: mol_type = other DNA
acaagttgtcatgtt

SEQ ID NO: 9618 - DNA, 15 bp, synthetic construct
  source 1..15: mol_type = other DNA
agctaataacctaca

SEQ ID NO: 9619 - DNA, 15 bp, synthetic construct
  source 1..15: mol_type = other DNA
aattggtgggctctt

SEQ ID NO: 9620 - DNA, 15 bp, synthetic construct
  source 1..15: mol_type = other DNA
tggcagtccaaacat

SEQ ID NO: 9621 - DNA, 15 bp, synthetic construct
  source 1..15: mol_type = other DNA
tacttttgcagtact

SEQ ID NO: 9622 - DNA, 15 bp, synthetic construct
  source 1..15: mol_type = other DNA
acggtttaggagacg

SEQ ID NO: 9623 - DNA, 15 bp, synthetic construct
  source 1..15: mol_type = other DNA
gaattagagtctgtc

SEQ ID NO: 9624 - DNA, 15 bp, synthetic construct
  source 1..15: mol_type = other DNA
gaattactaaaacac

SEQ ID NO: 9625 - DNA, 15 bp, synthetic construct
  source 1..15: mol_type = other DNA
tggtaatgactagga

SEQ ID NO: 9626 - DNA, 15 bp, synthetic construct
  source 1..15: mol_type = other DNA
gtgtgacttgtgcca

SEQ ID NO: 9627 - DNA, 15 bp, synthetic construct
  source 1..15: mol_type = other DNA
agagtacaaacatga

SEQ ID NO: 9628 - DNA, 15 bp, synthetic construct
  source 1..15: mol_type = other DNA
agctttatacataca

SEQ ID NO: 9629 - DNA, 15 bp, synthetic construct
  source 1..15: mol_type = other DNA
tctctgccttgtcca

SEQ ID NO: 9630 - DNA, 15 bp, synthetic construct
  source 1..15: mol_type = other DNA
tgatgcaaccatacg

SEQ ID NO: 9631 - DNA, 15 bp, synthetic construct
  source 1..15: mol_type = other DNA
gcagtctgtgatcga

SEQ ID NO: 9632 - DNA, 15 bp, synthetic construct
  source 1..15: mol_type = other DNA
gccttagtattggct

SEQ ID NO: 9633 - DNA, 15 bp, synthetic construct
  source 1..15: mol_type = other DNA
atccaactgcatggg

SEQ ID NO: 9634 - DNA, 15 bp, synthetic construct
  source 1..15: mol_type = other DNA
tctccaaaaatatgt

SEQ ID NO: 9635 - DNA, 15 bp, synthetic construct
  source 1..15: mol_type = other DNA
aaaagcccactagca

SEQ ID NO: 9636 - DNA, 15 bp, synthetic construct
  source 1..15: mol_type = other DNA
tcgaggcttcttttt

SEQ ID NO: 9637 - DNA, 15 bp, synthetic construct
  source 1..15: mol_type = other DNA
atgacgtcgtggaag

SEQ ID NO: 9638 - DNA, 15 bp, synthetic construct
  source 1..15: mol_type = other DNA
aacagctctgtgtgc

SEQ ID NO: 9639 - DNA, 15 bp, synthetic construct
  source 1..15: mol_type = other DNA
aaaccacgttggtat

SEQ ID NO: 9640 - DNA, 15 bp, synthetic construct
  source 1..15: mol_type = other DNA
gagcaagtaacatta

SEQ ID NO: 9641 - DNA, 15 bp, synthetic construct
  source 1..15: mol_type = other DNA
ttcttgagtcacaaa

SEQ ID NO: 9642 - DNA, 15 bp, synthetic construct
  source 1..15: mol_type = other DNA
tcaccaaaactaagc

SEQ ID NO: 9643 - DNA, 15 bp, synthetic construct
  source 1..15: mol_type = other DNA
tgtcttggtgttatt

SEQ ID NO: 9644 - DNA, 15 bp, synthetic construct
  source 1..15: mol_type = other DNA
cttcagtgatacatg

SEQ ID NO: 9645 - DNA, 15 bp, synthetic construct
  source 1..15: mol_type = other DNA
catttgaataatctg

SEQ ID NO: 9646 - DNA, 15 bp, synthetic construct
  source 1..15: mol_type = other DNA
tacaatggagcaacc

SEQ ID NO: 9647 - DNA, 15 bp, synthetic construct
  source 1..15: mol_type = other DNA
gtacttgaaggatcg

SEQ ID NO: 9648 - DNA, 15 bp, synthetic construct
  source 1..15: mol_type = other DNA
ctgctggatgatttt

SEQ ID NO: 9649 - DNA, 15 bp, synthetic construct
  source 1..15: mol_type = other DNA
gttttatagaagatg

SEQ ID NO: 9650 - DNA, 15 bp, synthetic construct
  source 1..15: mol_type = other DNA
gtcccaagaagttaa

SEQ ID NO: 9651 - DNA, 15 bp, synthetic construct
  source 1..15: mol_type = other DNA
ccaccctctccatgt

SEQ ID NO: 9652 - DNA, 15 bp, synthetic construct
  source 1..15: mol_type = other DNA
caatctcaaacatct

SEQ ID NO: 9653 - DNA, 15 bp, synthetic construct
  source 1..15: mol_type = other DNA
tagggcagaaacccc

SEQ ID NO: 9654 - DNA, 15 bp, synthetic construct
  source 1..15: mol_type = other DNA
acgtaacttctcacg

SEQ ID NO: 9655 - DNA, 15 bp, synthetic construct
  source 1..15: mol_type = other DNA
gtgtgctctctacgg

SEQ ID NO: 9656 - DNA, 15 bp, synthetic construct
  source 1..15: mol_type = other DNA
cctatacctgtgtta

SEQ ID NO: 9657 - DNA, 15 bp, synthetic construct
  source 1..15: mol_type = other DNA
cgtgtcaacactgag

SEQ ID NO: 9658 - DNA, 15 bp, synthetic construct
  source 1..15: mol_type = other DNA
ctgtcttctcttcca

SEQ ID NO: 9659 - DNA, 15 bp, synthetic construct
  source 1..15: mol_type = other DNA
cattaatcctatgat

SEQ ID NO: 9660 - DNA, 15 bp, synthetic construct
  source 1..15: mol_type = other DNA
gtgtatcaccaaacc

SEQ ID NO: 9661 - DNA, 15 bp, synthetic construct
  source 1..15: mol_type = other DNA
ctaatgaatcctttc

SEQ ID NO: 9662 - DNA, 15 bp, synthetic construct
  source 1..15: mol_type = other DNA
attcctttaacacct

SEQ ID NO: 9663 - DNA, 15 bp, synthetic construct
  source 1..15: mol_type = other DNA
gagaagatgcactta

SEQ ID NO: 9664 - DNA, 15 bp, synthetic construct
  source 1..15: mol_type = other DNA
tgaacacagaattgc

SEQ ID NO: 9665 - DNA, 15 bp, synthetic construct
  source 1..15: mol_type = other DNA
agttcagccttctgc

SEQ ID NO: 9666 - DNA, 15 bp, synthetic construct
  source 1..15: mol_type = other DNA
gaatattctggattc

SEQ ID NO: 9667 - DNA, 15 bp, synthetic construct
  source 1..15: mol_type = other DNA
actcttgttaacatg

SEQ ID NO: 9668 - DNA, 15 bp, synthetic construct
  source 1..15: mol_type = other DNA
tggtcattgaatagc

SEQ ID NO: 9669 - DNA, 15 bp, synthetic construct
  source 1..15: mol_type = other DNA
tgagtacagagtgaa

SEQ ID NO: 9670 - DNA, 15 bp, synthetic construct
  source 1..15: mol_type = other DNA
tgaagacttacctca

SEQ ID NO: 9671 - DNA, 15 bp, synthetic construct
  source 1..15: mol_type = other DNA
atggtggatactgcc

SEQ ID NO: 9672 - DNA, 15 bp, synthetic construct
  source 1..15: mol_type = other DNA
taccttgggcccaat

SEQ ID NO: 9673 - DNA, 15 bp, synthetic construct
  source 1..15: mol_type = other DNA
tgttttggcacatgt

SEQ ID NO: 9674 - DNA, 15 bp, synthetic construct
  source 1..15: mol_type = other DNA
agacacaaatttaca

SEQ ID NO: 9675 - DNA, 15 bp, synthetic construct
  source 1..15: mol_type = other DNA
attctgttttgttct

SEQ ID NO: 9676 - DNA, 15 bp, synthetic construct
  source 1..15: mol_type = other DNA
aaggatgtgagaagg

SEQ ID NO: 9677 - DNA, 15 bp, synthetic construct
  source 1..15: mol_type = other DNA
agagcatcagatatt

SEQ ID NO: 9678 - DNA, 15 bp, synthetic construct
  source 1..15: mol_type = other DNA
gtctaatccctaaag

SEQ ID NO: 9679 - DNA, 15 bp, synthetic construct
  source 1..15: mol_type = other DNA
ttcagccatgggttt

SEQ ID NO: 9680 - DNA, 15 bp, synthetic construct
  source 1..15: mol_type = other DNA
aatatacccttgtca

SEQ ID NO: 9681 - DNA, 15 bp, synthetic construct
  source 1..15: mol_type = other DNA
tctcatgcaagccaa

SEQ ID NO: 9682 - DNA, 15 bp, synthetic construct
  source 1..15: mol_type = other DNA
gtcaatgtcaagcat

SEQ ID NO: 9683 - DNA, 15 bp, synthetic construct
  source 1..15: mol_type = other DNA
tttcagatgaagggc

SEQ ID NO: 9684 - DNA, 15 bp, synthetic construct
  source 1..15: mol_type = other DNA
taggacttgggttag

SEQ ID NO: 9685 - DNA, 15 bp, synthetic construct
  source 1..15: mol_type = other DNA
ttctctgctagttgc

SEQ ID NO: 9686 - DNA, 15 bp, synthetic construct
  source 1..15: mol_type = other DNA
gactccgcttctcac

SEQ ID NO: 9687 - DNA, 15 bp, synthetic construct
  source 1..15: mol_type = other DNA
ctgtataatgatgat

SEQ ID NO: 9688 - DNA, 15 bp, synthetic construct
  source 1..15: mol_type = other DNA
catataggtaggaga

SEQ ID NO: 9689 - DNA, 15 bp, synthetic construct
  source 1..15: mol_type = other DNA
agaaccaggtactca

SEQ ID NO: 9690 - DNA, 15 bp, synthetic construct
  source 1..15: mol_type = other DNA
agtacaggcgaccca

SEQ ID NO: 9691 - DNA, 15 bp, synthetic construct
  source 1..15: mol_type = other DNA
cagtttatcttggct

SEQ ID NO: 9692 - DNA, 15 bp, synthetic construct
  source 1..15: mol_type = other DNA
ctatgcaaagataat

SEQ ID NO: 9693 - DNA, 15 bp, synthetic construct
  source 1..15: mol_type = other DNA
gcttgtcgaggtgag

SEQ ID NO: 9694 - DNA, 15 bp, synthetic construct
  source 1..15: mol_type = other DNA
aaatgaaccacaagg

SEQ ID NO: 9695 - DNA, 15 bp, synthetic construct
  source 1..15: mol_type = other DNA
ttgaccgtgaaacac

SEQ ID NO: 9696 - DNA, 15 bp, synthetic construct
  source 1..15: mol_type = other DNA
tctatttacagaaat

SEQ ID NO: 9697 - DNA, 15 bp, synthetic construct
  source 1..15: mol_type = other DNA
tatatatttgctatt

SEQ ID NO: 9698 - DNA, 15 bp, synthetic construct
  source 1..15: mol_type = other DNA
atcaagggagcaaac

SEQ ID NO: 9699 - DNA, 15 bp, synthetic construct
  source 1..15: mol_type = other DNA
tctaaaattgttcct

SEQ ID NO: 9700 - DNA, 15 bp, synthetic construct
  source 1..15: mol_type = other DNA
ctgccgtcacccatt

SEQ ID NO: 9701 - DNA, 15 bp, synthetic construct
  source 1..15: mol_type = other DNA
tccctgtaaacagat

SEQ ID NO: 9702 - DNA, 15 bp, synthetic construct
  source 1..15: mol_type = other DNA
ttcatcgtggaattg

SEQ ID NO: 9703 - DNA, 15 bp, synthetic construct
  source 1..15: mol_type = other DNA
gtcaatggtgcaatt

SEQ ID NO: 9704 - DNA, 15 bp, synthetic construct
  source 1..15: mol_type = other DNA
tgctgtctagatcca

SEQ ID NO: 9705 - DNA, 15 bp, synthetic construct
  source 1..15: mol_type = other DNA
ctacaaaactgagag

SEQ ID NO: 9706 - DNA, 15 bp, synthetic construct
  source 1..15: mol_type = other DNA
tagcagcagcttctt

SEQ ID NO: 9707 - DNA, 15 bp, synthetic construct
  source 1..15: mol_type = other DNA
catagtaagtgtact

SEQ ID NO: 9708 - DNA, 15 bp, synthetic construct
  source 1..15: mol_type = other DNA
ctaagggaggaacat

SEQ ID NO: 9709 - DNA, 15 bp, synthetic construct
  source 1..15: mol_type = other DNA
ccagaacagctccag

SEQ ID NO: 9710 - DNA, 15 bp, synthetic construct
  source 1..15: mol_type = other DNA
tgtatcctgtcagtg

SEQ ID NO: 9711 - DNA, 15 bp, synthetic construct
  source 1..15: mol_type = other DNA
gccactcatcatttt

SEQ ID NO: 9712 - DNA, 15 bp, synthetic construct
  source 1..15: mol_type = other DNA
aagtccatgatccta

SEQ ID NO: 9713 - DNA, 15 bp, synthetic construct
  source 1..15: mol_type = other DNA
gccactcatcatttt

SEQ ID NO: 9714 - DNA, 15 bp, synthetic construct
  source 1..15: mol_type = other DNA
aagtccatgatccta

SEQ ID NO: 9715 - DNA, 15 bp, synthetic construct
  source 1..15: mol_type = other DNA
aagtcgtacaatggt

SEQ ID NO: 9716 - DNA, 15 bp, synthetic construct
  source 1..15: mol_type = other DNA
ttcagtcacatccag

SEQ ID NO: 9717 - DNA, 15 bp, synthetic construct
  source 1..15: mol_type = other DNA
ctctattctccagtg

SEQ ID NO: 9718 - DNA, 15 bp, synthetic construct
  source 1..15: mol_type = other DNA
taccacaattttagg

SEQ ID NO: 9719 - DNA, 15 bp, synthetic construct
  source 1..15: mol_type = other DNA
agtttaactttggcc

SEQ ID NO: 9720 - DNA, 15 bp, synthetic construct
  source 1..15: mol_type = other DNA
taaaacatcactaca

SEQ ID NO: 9721 - DNA, 15 bp, synthetic construct
  source 1..15: mol_type = other DNA
gctgtctaggctaaa

SEQ ID NO: 9722 - DNA, 15 bp, synthetic construct
  source 1..15: mol_type = other DNA
tggtatgtgctggaa

SEQ ID NO: 9723 - DNA, 15 bp, synthetic construct
  source 1..15: mol_type = other DNA
ttgacttccttagtc

SEQ ID NO: 9724 - DNA, 15 bp, synthetic construct
  source 1..15: mol_type = other DNA
cctctctgcgcttgg

SEQ ID NO: 9725 - DNA, 15 bp, synthetic construct
  source 1..15: mol_type = other DNA
ggactctggttatca

SEQ ID NO: 9726 - DNA, 15 bp, synthetic construct
  source 1..15: mol_type = other DNA
attaacattggtaga

SEQ ID NO: 9727 - DNA, 15 bp, synthetic construct
  source 1..15: mol_type = other DNA
gattgaggaaagcag

SEQ ID NO: 9728 - DNA, 15 bp, synthetic construct
  source 1..15: mol_type = other DNA
actgggatatacaca

SEQ ID NO: 9729 - DNA, 15 bp, synthetic construct
  source 1..15: mol_type = other DNA
tcatccattagttga

SEQ ID NO: 9730 - DNA, 15 bp, synthetic construct
  source 1..15: mol_type = other DNA
ggcacgagctcaaag

SEQ ID NO: 9731 - DNA, 15 bp, synthetic construct
  source 1..15: mol_type = other DNA
cgctccatcaatcca

SEQ ID NO: 9732 - DNA, 15 bp, synthetic construct
  source 1..15: mol_type = other DNA
gagtgtattcattgg

SEQ ID NO: 9733 - DNA, 15 bp, synthetic construct
  source 1..15: mol_type = other DNA
ctcgtcgtgacagcc

SEQ ID NO: 9734 - DNA, 15 bp, synthetic construct
  source 1..15: mol_type = other DNA
aatatagtaatgaca

SEQ ID NO: 9735 - DNA, 15 bp, synthetic construct
  source 1..15: mol_type = other DNA
aagctctgtgattat

SEQ ID NO: 9736 - DNA, 15 bp, synthetic construct
  source 1..15: mol_type = other DNA
accatatgagctatc

SEQ ID NO: 9737 - DNA, 15 bp, synthetic construct
  source 1..15: mol_type = other DNA
tttctcactaaccat

SEQ ID NO: 9738 - DNA, 15 bp, synthetic construct
  source 1..15: mol_type = other DNA
aacttgaaattaatg

SEQ ID NO: 9739 - DNA, 15 bp, synthetic construct
  source 1..15: mol_type = other DNA
tattttgcctacctg

SEQ ID NO: 9740 - DNA, 15 bp, synthetic construct
  source 1..15: mol_type = other DNA
tgccagggtcttatg

SEQ ID NO: 9741 - DNA, 15 bp, synthetic construct
  source 1..15: mol_type = other DNA
cctttcttgaagcca

SEQ ID NO: 9742 - DNA, 15 bp, synthetic construct
  source 1..15: mol_type = other DNA
ctatcccctttctga

SEQ ID NO: 9743 - DNA, 15 bp, synthetic construct
  source 1..15: mol_type = other DNA
cacgtccatcttcaa

SEQ ID NO: 9744 - DNA, 15 bp, synthetic construct
  source 1..15: mol_type = other DNA
cgttgtgtgtaacca

SEQ ID NO: 9745 - DNA, 15 bp, synthetic construct
  source 1..15: mol_type = other DNA
agaaaatgctcgaaa

SEQ ID NO: 9746 - DNA, 15 bp, synthetic construct
  source 1..15: mol_type = other DNA
tcaatttgacttcac

SEQ ID NO: 9747 - DNA, 15 bp, synthetic construct
  source 1..15: mol_type = other DNA
ggactgaggaggaca

SEQ ID NO: 9748 - DNA, 15 bp, synthetic construct
  source 1..15: mol_type = other DNA
gggtacccagttaat

SEQ ID NO: 9749 - DNA, 15 bp, synthetic construct
  source 1..15: mol_type = other DNA
cccatgactacacca

SEQ ID NO: 9750 - DNA, 15 bp, synthetic construct
  source 1..15: mol_type = other DNA
cccctcttaattctc

SEQ ID NO: 9751 - DNA, 15 bp, synthetic construct
  source 1..15: mol_type = other DNA
ttcaggacctgattc

SEQ ID NO: 9752 - DNA, 15 bp, synthetic construct
  source 1..15: mol_type = other DNA
aattacatcaaggag

SEQ ID NO: 9753 - DNA, 15 bp, synthetic construct
  source 1..15: mol_type = other DNA
ggatagactccaatg

SEQ ID NO: 9754 - DNA, 15 bp, synthetic construct
  source 1..15: mol_type = other DNA
tggtagtcagtagtc

SEQ ID NO: 9755 - DNA, 15 bp, synthetic construct
  source 1..15: mol_type = other DNA
tgagaggagactact

SEQ ID NO: 9756 - DNA, 15 bp, synthetic construct
  source 1..15: mol_type = other DNA
ctggatgagattgat

SEQ ID NO: 9757 - DNA, 15 bp, synthetic construct
  source 1..15: mol_type = other DNA
atgttggtgttatcc

SEQ ID NO: 9758 - DNA, 15 bp, synthetic construct
  source 1..15: mol_type = other DNA
gtcttggctttcagg

SEQ ID NO: 9759 - DNA, 15 bp, synthetic construct
  source 1..15: mol_type = other DNA
gtctcttcgtcaact

SEQ ID NO: 9760 - DNA, 15 bp, synthetic construct
  source 1..15: mol_type = other DNA
ccagtctcagataca

SEQ ID NO: 9761 - DNA, 15 bp, synthetic construct
  source 1..15: mol_type = other DNA
ctgagactggatgga

SEQ ID NO: 9762 - DNA, 15 bp, synthetic construct
  source 1..15: mol_type = other DNA
tctggcagagtttga

SEQ ID NO: 9763 - DNA, 15 bp, synthetic construct
  source 1..15: mol_type = other DNA
tcaaaacaagcattg

SEQ ID NO: 9764 - DNA, 15 bp, synthetic construct
  source 1..15: mol_type = other DNA
tctgcattgtatcca

SEQ ID NO: 9765 - DNA, 15 bp, synthetic construct
  source 1..15: mol_type = other DNA
gtaggcccaagtaga

SEQ ID NO: 9766 - DNA, 15 bp, synthetic construct
  source 1..15: mol_type = other DNA
cagtcatctttcggt

SEQ ID NO: 9767 - DNA, 15 bp, synthetic construct
  source 1..15: mol_type = other DNA
aactaggaagatagt

SEQ ID NO: 9768 - DNA, 15 bp, synthetic construct
  source 1..15: mol_type = other DNA
aggtgcactctcatg

SEQ ID NO: 9769 - DNA, 15 bp, synthetic construct
  source 1..15: mol_type = other DNA
tggttaatgatgttc

SEQ ID NO: 9770 - DNA, 15 bp, synthetic construct
  source 1..15: mol_type = other DNA
ccaagcttgaacaga

SEQ ID NO: 9771 - DNA, 15 bp, synthetic construct
  source 1..15: mol_type = other DNA
tgtcctgcatcttac

SEQ ID NO: 9772 - DNA, 15 bp, synthetic construct
  source 1..15: mol_type = other DNA
aatgacaagaatcat

SEQ ID NO: 9773 - DNA, 15 bp, synthetic construct
  source 1..15: mol_type = other DNA
tgtcctgcatcttac

SEQ ID NO: 9774 - DNA, 15 bp, synthetic construct
  source 1..15: mol_type = other DNA
aatgacaagaatcat

SEQ ID NO: 9775 - DNA, 15 bp, synthetic construct
  source 1..15: mol_type = other DNA
agtttcttacgaatc

SEQ ID NO: 9776 - DNA, 15 bp, synthetic construct
  source 1..15: mol_type = other DNA
caaagctcattgacg

SEQ ID NO: 9777 - DNA, 15 bp, synthetic construct
  source 1..15: mol_type = other DNA
tcccatttttcctcc

SEQ ID NO: 9778 - DNA, 15 bp, synthetic construct
  source 1..15: mol_type = other DNA
gttatctctggctga

SEQ ID NO: 9779 - DNA, 15 bp, synthetic construct
  source 1..15: mol_type = other DNA
tctaagagctgaccc

SEQ ID NO: 9780 - DNA, 15 bp, synthetic construct
  source 1..15: mol_type = other DNA
ggacagactaaaagg

SEQ ID NO: 9781 - DNA, 15 bp, synthetic construct
  source 1..15: mol_type = other DNA
tttcaccttttcttc

SEQ ID NO: 9782 - DNA, 15 bp, synthetic construct
  source 1..15: mol_type = other DNA
tgatatcaagaggat

SEQ ID NO: 9783 - DNA, 15 bp, synthetic construct
  source 1..15: mol_type = other DNA
tttcaccttttcttc

SEQ ID NO: 9784 - DNA, 15 bp, synthetic construct
  source 1..15: mol_type = other DNA
tgatatcaagaggat

SEQ ID NO: 9785 - DNA, 15 bp, synthetic construct
  source 1..15: mol_type = other DNA
ccttcaagtctttca

SEQ ID NO: 9786 - DNA, 15 bp, synthetic construct
  source 1..15: mol_type = other DNA
tggaggcttgactag

SEQ ID NO: 9787 - DNA, 15 bp, synthetic construct
  source 1..15: mol_type = other DNA
aggtgaaaatacttg

SEQ ID NO: 9788 - DNA, 15 bp, synthetic construct
  source 1..15: mol_type = other DNA
cagagtgacctagaa

SEQ ID NO: 9789 - DNA, 15 bp, synthetic construct
  source 1..15: mol_type = other DNA
ctagatgtcgtgtct

SEQ ID NO: 9790 - DNA, 15 bp, synthetic construct
  source 1..15: mol_type = other DNA
gagctgaaagtaagc

SEQ ID NO: 9791 - DNA, 15 bp, synthetic construct
  source 1..15: mol_type = other DNA
gggctaggtggtaag

SEQ ID NO: 9792 - DNA, 15 bp, synthetic construct
  source 1..15: mol_type = other DNA
accctattccagaag

SEQ ID NO: 9793 - DNA, 15 bp, synthetic construct
  source 1..15: mol_type = other DNA
ctgctttctcatccc

SEQ ID NO: 9794 - DNA, 15 bp, synthetic construct
  source 1..15: mol_type = other DNA
acaacgtggaagatg

SEQ ID NO: 9795 - DNA, 15 bp, synthetic construct
  source 1..15: mol_type = other DNA
ctgctttctcatccc

SEQ ID NO: 9796 - DNA, 15 bp, synthetic construct
  source 1..15: mol_type = other DNA
acaacgtggaagatg

SEQ ID NO: 9797 - DNA, 15 bp, synthetic construct
  source 1..15: mol_type = other DNA
atgaatctccagtac

SEQ ID NO: 9798 - DNA, 15 bp, synthetic construct
  source 1..15: mol_type = other DNA
tgattgatgtgattc

SEQ ID NO: 9799 - DNA, 15 bp, synthetic construct
  source 1..15: mol_type = other DNA
cctttttgatatgag

SEQ ID NO: 9800 - DNA, 15 bp, synthetic construct
  source 1..15: mol_type = other DNA
tgtattcagtatatc

SEQ ID NO: 9801 - DNA, 15 bp, synthetic construct
  source 1..15: mol_type = other DNA
cctttttgatatgag

SEQ ID NO: 9802 - DNA, 15 bp, synthetic construct
  source 1..15: mol_type = other DNA
tgtattcagtatatc

SEQ ID NO: 9803 - DNA, 15 bp, synthetic construct
  source 1..15: mol_type = other DNA
ggagtactagaggag

SEQ ID NO: 9804 - DNA, 15 bp, synthetic construct
  source 1..15: mol_type = other DNA
ctttactcagtacgg

SEQ ID NO: 9805 - DNA, 15 bp, synthetic construct
  source 1..15: mol_type = other DNA
tccgagtccacaata

SEQ ID NO: 9806 - DNA, 15 bp, synthetic construct
  source 1..15: mol_type = other DNA
ggtattgggttatct

SEQ ID NO: 9807 - DNA, 15 bp, synthetic construct
  source 1..15: mol_type = other DNA
acagtgagtgtaagt

SEQ ID NO: 9808 - DNA, 15 bp, synthetic construct
  source 1..15: mol_type = other DNA
cagtccctagaagag

SEQ ID NO: 9809 - DNA, 15 bp, synthetic construct
  source 1..15: mol_type = other DNA
tccttattgatttca

SEQ ID NO: 9810 - DNA, 15 bp, synthetic construct
  source 1..15: mol_type = other DNA
caccactagcaagta

SEQ ID NO: 9811 - DNA, 15 bp, synthetic construct
  source 1..15: mol_type = other DNA
tccttattgatttca

SEQ ID NO: 9812 - DNA, 15 bp, synthetic construct
  source 1..15: mol_type = other DNA
caccactagcaagta

SEQ ID NO: 9813 - DNA, 15 bp, synthetic construct
  source 1..15: mol_type = other DNA
gtcacaagaacaggc

SEQ ID NO: 9814 - DNA, 15 bp, synthetic construct
  source 1..15: mol_type = other DNA
attgtcctggactgt

SEQ ID NO: 9815 - DNA, 15 bp, synthetic construct
  source 1..15: mol_type = other DNA
ggttgggtaactcta

SEQ ID NO: 9816 - DNA, 15 bp, synthetic construct
  source 1..15: mol_type = other DNA
ggagaaattcaatcg

SEQ ID NO: 9817 - DNA, 15 bp, synthetic construct
  source 1..15: mol_type = other DNA
acctctgtctctact

SEQ ID NO: 9818 - DNA, 15 bp, synthetic construct
  source 1..15: mol_type = other DNA
acgttggaggagaat

SEQ ID NO: 9819 - DNA, 15 bp, synthetic construct
  source 1..15: mol_type = other DNA
acctctgtctctact

SEQ ID NO: 9820 - DNA, 15 bp, synthetic construct
  source 1..15: mol_type = other DNA
acgttggaggagaat

SEQ ID NO: 9821 - DNA, 15 bp, synthetic construct
  source 1..15: mol_type = other DNA
tcaaccggtggtatt

SEQ ID NO: 9822 - DNA, 15 bp, synthetic construct
  source 1..15: mol_type = other DNA
cactacaagaagcgt

SEQ ID NO: 9823 - DNA, 15 bp, synthetic construct
  source 1..15: mol_type = other DNA
tcaaccggtggtatt

SEQ ID NO: 9824 - DNA, 15 bp, synthetic construct
  source 1..15: mol_type = other DNA
cactacaagaagcgt

SEQ ID NO: 9825 - DNA, 15 bp, synthetic construct
  source 1..15: mol_type = other DNA
tccgttcttcaaact

SEQ ID NO: 9826 - DNA, 15 bp, synthetic construct
  source 1..15: mol_type = other DNA
ttcttccatagttct

SEQ ID NO: 9827 - DNA, 15 bp, synthetic construct
  source 1..15: mol_type = other DNA
accctaataaacagc

SEQ ID NO: 9828 - DNA, 15 bp, synthetic construct
  source 1..15: mol_type = other DNA
ctctttaagctttac

SEQ ID NO: 9829 - DNA, 15 bp, synthetic construct
  source 1..15: mol_type = other DNA
gcttctcaatttcca

SEQ ID NO: 9830 - DNA, 15 bp, synthetic construct
  source 1..15: mol_type = other DNA
atattgcggctgaac

SEQ ID NO: 9831 - DNA, 15 bp, synthetic construct
  source 1..15: mol_type = other DNA
gcttctcaatttcca

SEQ ID NO: 9832 - DNA, 15 bp, synthetic construct
  source 1..15: mol_type = other DNA
atattgcggctgaac

SEQ ID NO: 9833 - DNA, 15 bp, synthetic construct
  source 1..15: mol_type = other DNA
ctgagcccgtactac

SEQ ID NO: 9834 - DNA, 15 bp, synthetic construct
  source 1..15: mol_type = other DNA
gtatgacaagcgaaa

SEQ ID NO: 9835 - DNA, 15 bp, synthetic construct
  source 1..15: mol_type = other DNA
ctgagcccgtactac

SEQ ID NO: 9836 - DNA, 15 bp, synthetic construct
  source 1..15: mol_type = other DNA
gtatgacaagcgaaa

SEQ ID NO: 9837 - DNA, 15 bp, synthetic construct
  source 1..15: mol_type = other DNA
taattaaactgtgtg

SEQ ID NO: 9838 - DNA, 15 bp, synthetic construct
  source 1..15: mol_type = other DNA
tttttctgggtgaag

SEQ ID NO: 9839 - DNA, 15 bp, synthetic construct
  source 1..15: mol_type = other DNA
aagcctgagatggag

SEQ ID NO: 9840 - DNA, 15 bp, synthetic construct
  source 1..15: mol_type = other DNA
tagttgattgggaca

SEQ ID NO: 9841 - DNA, 15 bp, synthetic construct
  source 1..15: mol_type = other DNA
tcaactagtctagcc

SEQ ID NO: 9842 - DNA, 15 bp, synthetic construct
  source 1..15: mol_type = other DNA
tcccttaggtaagtc

SEQ ID NO: 9843 - DNA, 15 bp, synthetic construct
  source 1..15: mol_type = other DNA
cagagtagaccatgc

SEQ ID NO: 9844 - DNA, 15 bp, synthetic construct
  source 1..15: mol_type = other DNA
tactgagtgattagg

SEQ ID NO: 9845 - DNA, 15 bp, synthetic construct
  source 1..15: mol_type = other DNA
tctccgctgtttcca

SEQ ID NO: 9846 - DNA, 15 bp, synthetic construct
  source 1..15: mol_type = other DNA
attggtacactccaa

SEQ ID NO: 9847 - DNA, 15 bp, synthetic construct
  source 1..15: mol_type = other DNA
tgggttgtactactc

SEQ ID NO: 9848 - DNA, 15 bp, synthetic construct
  source 1..15: mol_type = other DNA
cagttctcgggcgta

SEQ ID NO: 9849 - DNA, 15 bp, synthetic construct
  source 1..15: mol_type = other DNA
gcttcaacttgaccc

SEQ ID NO: 9850 - DNA, 15 bp, synthetic construct
  source 1..15: mol_type = other DNA
aggtggagaaggaca

SEQ ID NO: 9851 - DNA, 15 bp, synthetic construct
  source 1..15: mol_type = other DNA
aggtggagaaggaca

SEQ ID NO: 9852 - DNA, 15 bp, synthetic construct
  source 1..15: mol_type = other DNA
cagtcagctgagtag

SEQ ID NO: 9853 - DNA, 15 bp, synthetic construct
  source 1..15: mol_type = other DNA
tgaaggtctcaaaag

SEQ ID NO: 9854 - DNA, 15 bp, synthetic construct
  source 1..15: mol_type = other DNA
tgagcctttgtattg

SEQ ID NO: 9855 - DNA, 15 bp, synthetic construct
  source 1..15: mol_type = other DNA
aacaagagtctagca

SEQ ID NO: 9856 - DNA, 15 bp, synthetic construct
  source 1..15: mol_type = other DNA
aggtcttacctttcg

SEQ ID NO: 9857 - DNA, 15 bp, synthetic construct
  source 1..15: mol_type = other DNA
agaatcaggatactc

SEQ ID NO: 9858 - DNA, 15 bp, synthetic construct
  source 1..15: mol_type = other DNA
ctatgtaaacataaa

SEQ ID NO: 9859 - DNA, 15 bp, synthetic construct
  source 1..15: mol_type = other DNA
ctggtgacgttgagc

SEQ ID NO: 9860 - DNA, 15 bp, synthetic construct
  source 1..15: mol_type = other DNA
tttaggtgatctcag

SEQ ID NO: 9861 - DNA, 15 bp, synthetic construct
  source 1..15: mol_type = other DNA
aaggactcggttggc

SEQ ID NO: 9862 - DNA, 15 bp, synthetic construct
  source 1..15: mol_type = other DNA
aaaggcagaataaaa

SEQ ID NO: 9863 - DNA, 15 bp, synthetic construct
  source 1..15: mol_type = other DNA
ttctactgccttggc

SEQ ID NO: 9864 - DNA, 15 bp, synthetic construct
  source 1..15: mol_type = other DNA
agacataagcataag

SEQ ID NO: 9865 - DNA, 15 bp, synthetic construct
  source 1..15: mol_type = other DNA
gtctatagcttgggc

SEQ ID NO: 9866 - DNA, 15 bp, synthetic construct
  source 1..15: mol_type = other DNA
tggagctggattagc

SEQ ID NO: 9867 - DNA, 15 bp, synthetic construct
  source 1..15: mol_type = other DNA
ccacaaagatgatga

SEQ ID NO: 9868 - DNA, 15 bp, synthetic construct
  source 1..15: mol_type = other DNA
agaagaatgtacaag

SEQ ID NO: 9869 - DNA, 15 bp, synthetic construct
  source 1..15: mol_type = other DNA
tatttgggattcaat

SEQ ID NO: 9870 - DNA, 15 bp, synthetic construct
  source 1..15: mol_type = other DNA
aactatgcataggaa

SEQ ID NO: 9871 - DNA, 15 bp, synthetic construct
  source 1..15: mol_type = other DNA
tgaacataaacctct

SEQ ID NO: 9872 - DNA, 15 bp, synthetic construct
  source 1..15: mol_type = other DNA
ggaccgatttccatt

SEQ ID NO: 9873 - DNA, 15 bp, synthetic construct
  source 1..15: mol_type = other DNA
cttagcatcatcttc

SEQ ID NO: 9874 - DNA, 15 bp, synthetic construct
  source 1..15: mol_type = other DNA
caatcctaggaccgt

SEQ ID NO: 9875 - DNA, 15 bp, synthetic construct
  source 1..15: mol_type = other DNA
cttagcatcatcttc

SEQ ID NO: 9876 - DNA, 15 bp, synthetic construct
  source 1..15: mol_type = other DNA
caatcctaggaccgt

SEQ ID NO: 9877 - DNA, 15 bp, synthetic construct
  source 1..15: mol_type = other DNA
tgagtgaatttattt

SEQ ID NO: 9878 - DNA, 15 bp, synthetic construct
  source 1..15: mol_type = other DNA
aatcccacctgcata

SEQ ID NO: 9879 - DNA, 15 bp, synthetic construct
  source 1..15: mol_type = other DNA
atggtcttagaaata

SEQ ID NO: 9880 - DNA, 15 bp, synthetic construct
  source 1..15: mol_type = other DNA
ttcagatttgaactg

SEQ ID NO: 9881 - DNA, 15 bp, synthetic construct
  source 1..15: mol_type = other DNA
atccctctatgctcc

SEQ ID NO: 9882 - DNA, 15 bp, synthetic construct
  source 1..15: mol_type = other DNA
ccgatatcagcttcg

SEQ ID NO: 9883 - DNA, 15 bp, synthetic construct
  source 1..15: mol_type = other DNA
tagggccgagattag

SEQ ID NO: 9884 - DNA, 15 bp, synthetic construct
  source 1..15: mol_type = other DNA
cccaaatgtgagagt

SEQ ID NO: 9885 - DNA, 15 bp, synthetic construct
  source 1..15: mol_type = other DNA
accagtaccaataac

SEQ ID NO: 9886 - DNA, 15 bp, synthetic construct
  source 1..15: mol_type = other DNA
cttcctagaatcatc

SEQ ID NO: 9887 - DNA, 15 bp, synthetic construct
  source 1..15: mol_type = other DNA
tagtagttggcaata

SEQ ID NO: 9888 - DNA, 15 bp, synthetic construct
  source 1..15: mol_type = other DNA
taaaccggcaggaga

SEQ ID NO: 9889 - DNA, 15 bp, synthetic construct
  source 1..15: mol_type = other DNA
cattcatagaaccct

SEQ ID NO: 9890 - DNA, 15 bp, synthetic construct
  source 1..15: mol_type = other DNA
aacagggccacttat

SEQ ID NO: 9891 - DNA, 15 bp, synthetic construct
  source 1..15: mol_type = other DNA
acaaagttggtattg

SEQ ID NO: 9892 - DNA, 15 bp, synthetic construct
  source 1..15: mol_type = other DNA
ttagtgattggcaac

SEQ ID NO: 9893 - DNA, 15 bp, synthetic construct
  source 1..15: mol_type = other DNA
attacgtccttatcc

SEQ ID NO: 9894 - DNA, 15 bp, synthetic construct
  source 1..15: mol_type = other DNA
agagcaggatgctgt

SEQ ID NO: 9895 - DNA, 15 bp, synthetic construct
  source 1..15: mol_type = other DNA
ttacctgtatttacc

SEQ ID NO: 9896 - DNA, 15 bp, synthetic construct
  source 1..15: mol_type = other DNA
ttttcacagcccaat

SEQ ID NO: 9897 - DNA, 15 bp, synthetic construct
  source 1..15: mol_type = other DNA
ggctcaagtttttac

SEQ ID NO: 9898 - DNA, 15 bp, synthetic construct
  source 1..15: mol_type = other DNA
gtgcctcctttaaac

SEQ ID NO: 9899 - DNA, 15 bp, synthetic construct
  source 1..15: mol_type = other DNA
atggtaggatgatag

SEQ ID NO: 9900 - DNA, 15 bp, synthetic construct
  source 1..15: mol_type = other DNA
catttctttccctta

SEQ ID NO: 9901 - DNA, 15 bp, synthetic construct
  source 1..15: mol_type = other DNA
tttgtggctaaatct

SEQ ID NO: 9902 - DNA, 15 bp, synthetic construct
  source 1..15: mol_type = other DNA
tacaatggtgactct

SEQ ID NO: 9903 - DNA, 15 bp, synthetic construct
  source 1..15: mol_type = other DNA
taaacaagcttctgt

SEQ ID NO: 9904 - DNA, 15 bp, synthetic construct
  source 1..15: mol_type = other DNA
tgagaagctcttcat

SEQ ID NO: 9905 - DNA, 15 bp, synthetic construct
  source 1..15: mol_type = other DNA
gtactcataacctgc

SEQ ID NO: 9906 - DNA, 15 bp, synthetic construct
  source 1..15: mol_type = other DNA
ggataagagagacaa

SEQ ID NO: 9907 - DNA, 15 bp, synthetic construct
  source 1..15: mol_type = other DNA
attcgggacagtttg

SEQ ID NO: 9908 - DNA, 15 bp, synthetic construct
  source 1..15: mol_type = other DNA
actggacaatggatt

SEQ ID NO: 9909 - DNA, 15 bp, synthetic construct
  source 1..15: mol_type = other DNA
gatacctgatgcagg

SEQ ID NO: 9910 - DNA, 15 bp, synthetic construct
  source 1..15: mol_type = other DNA
cttaaaagcccaggt

SEQ ID NO: 9911 - DNA, 15 bp, synthetic construct
  source 1..15: mol_type = other DNA
atgtaacgtcactgt

SEQ ID NO: 9912 - DNA, 15 bp, synthetic construct
  source 1..15: mol_type = other DNA
tttgtcttccttctc

SEQ ID NO: 9913 - DNA, 15 bp, synthetic construct
  source 1..15: mol_type = other DNA
ttccttgaacactcc

SEQ ID NO: 9914 - DNA, 15 bp, synthetic construct
  source 1..15: mol_type = other DNA
tgtccacgaaacgtg

SEQ ID NO: 9915 - DNA, 15 bp, synthetic construct
  source 1..15: mol_type = other DNA
gtttcaggcaatgca

SEQ ID NO: 9916 - DNA, 15 bp, synthetic construct
  source 1..15: mol_type = other DNA
caggaacaatcacag

SEQ ID NO: 9917 - DNA, 15 bp, synthetic construct
  source 1..15: mol_type = other DNA
agctgccataccctg

SEQ ID NO: 9918 - DNA, 15 bp, synthetic construct
  source 1..15: mol_type = other DNA
ctcagaccctgctct

SEQ ID NO: 9919 - DNA, 15 bp, synthetic construct
  source 1..15: mol_type = other DNA
aaaactcccaggctg

SEQ ID NO: 9920 - DNA, 15 bp, synthetic construct
  source 1..15: mol_type = other DNA
caccagtgattgttg

SEQ ID NO: 9921 - DNA, 15 bp, synthetic construct
  source 1..15: mol_type = other DNA
aaaactcccaggctg

SEQ ID NO: 9922 - DNA, 15 bp, synthetic construct
  source 1..15: mol_type = other DNA
caccagtgattgttg

SEQ ID NO: 9923 - DNA, 15 bp, synthetic construct
  source 1..15: mol_type = other DNA
caccttgcagggttt

SEQ ID NO: 9924 - DNA, 15 bp, synthetic construct
  source 1..15: mol_type = other DNA
ggaaaatgtgtcccc

SEQ ID NO: 9925 - DNA, 15 bp, synthetic construct
  source 1..15: mol_type = other DNA
tcacatgcaaatgtg

SEQ ID NO: 9926 - DNA, 15 bp, synthetic construct
  source 1..15: mol_type = other DNA
tcaatttttggtttt

SEQ ID NO: 9927 - DNA, 15 bp, synthetic construct
  source 1..15: mol_type = other DNA
gaggtctgtggtcct

SEQ ID NO: 9928 - DNA, 15 bp, synthetic construct
  source 1..15: mol_type = other DNA
gtcctgggtgtctct

SEQ ID NO: 9929 - DNA, 15 bp, synthetic construct
  source 1..15: mol_type = other DNA
atctggctccccctt

SEQ ID NO: 9930 - DNA, 15 bp, synthetic construct
  source 1..15: mol_type = other DNA
ggctgccaccctgaa

SEQ ID NO: 9931 - DNA, 15 bp, synthetic construct
  source 1..15: mol_type = other DNA
atctggctccccctt

SEQ ID NO: 9932 - DNA, 15 bp, synthetic construct
  source 1..15: mol_type = other DNA
ggctgccaccctgaa

SEQ ID NO: 9933 - DNA, 15 bp, synthetic construct
  source 1..15: mol_type = other DNA
aaaggccatccagct

SEQ ID NO: 9934 - DNA, 15 bp, synthetic construct
  source 1..15: mol_type = other DNA
ttccgattcccttct

SEQ ID NO: 9935 - DNA, 15 bp, synthetic construct
  source 1..15: mol_type = other DNA
aaaggccatccagct

SEQ ID NO: 9936 - DNA, 15 bp, synthetic construct
  source 1..15: mol_type = other DNA
ttccgattcccttct

SEQ ID NO: 9937 - DNA, 15 bp, synthetic construct
  source 1..15: mol_type = other DNA
ctggaccagagccag

SEQ ID NO: 9938 - DNA, 15 bp, synthetic construct
  source 1..15: mol_type = other DNA
tggacccacctcttc

SEQ ID NO: 9939 - DNA, 15 bp, synthetic construct
  source 1..15: mol_type = other DNA
acagaggctctgggg

SEQ ID NO: 9940 - DNA, 15 bp, synthetic construct
  source 1..15: mol_type = other DNA
ttgggcaggaggaca

SEQ ID NO: 9941 - DNA, 15 bp, synthetic construct
  source 1..15: mol_type = other DNA
aaagacaatgaccag

SEQ ID NO: 9942 - DNA, 15 bp, synthetic construct
  source 1..15: mol_type = other DNA
agacctggctcagca

SEQ ID NO: 9943 - DNA, 15 bp, synthetic construct
  source 1..15: mol_type = other DNA
catccttcaatgcag

SEQ ID NO: 9944 - DNA, 15 bp, synthetic construct
  source 1..15: mol_type = other DNA
attcaatccagagca

SEQ ID NO: 9945 - DNA, 15 bp, synthetic construct
  source 1..15: mol_type = other DNA
catccttcaatgcag

SEQ ID NO: 9946 - DNA, 15 bp, synthetic construct
  source 1..15: mol_type = other DNA
attcaatccagagca

SEQ ID NO: 9947 - DNA, 15 bp, synthetic construct
  source 1..15: mol_type = other DNA
aaccggagtgaaggg

SEQ ID NO: 9948 - DNA, 15 bp, synthetic construct
  source 1..15: mol_type = other DNA
cttctctgctatttc

SEQ ID NO: 9949 - DNA, 15 bp, synthetic construct
  source 1..15: mol_type = other DNA
tattctacctaatgc

SEQ ID NO: 9950 - DNA, 15 bp, synthetic construct
  source 1..15: mol_type = other DNA
acatagtgaagatca

SEQ ID NO: 9951 - DNA, 15 bp, synthetic construct
  source 1..15: mol_type = other DNA
tacaacttgacaggc

SEQ ID NO: 9952 - DNA, 15 bp, synthetic construct
  source 1..15: mol_type = other DNA
tttgcaaacaagtac

SEQ ID NO: 9953 - DNA, 15 bp, synthetic construct
  source 1..15: mol_type = other DNA
gcgtttcagacacag

SEQ ID NO: 9954 - DNA, 15 bp, synthetic construct
  source 1..15: mol_type = other DNA
tgcactaatctcctg

SEQ ID NO: 9955 - DNA, 15 bp, synthetic construct
  source 1..15: mol_type = other DNA
tcttcttttcaaact

SEQ ID NO: 9956 - DNA, 15 bp, synthetic construct
  source 1..15: mol_type = other DNA
gattccccagtacat

SEQ ID NO: 9957 - DNA, 15 bp, synthetic construct
  source 1..15: mol_type = other DNA
aaagagtacccaatc

SEQ ID NO: 9958 - DNA, 15 bp, synthetic construct
  source 1..15: mol_type = other DNA
catctactgcaacat

SEQ ID NO: 9959 - DNA, 15 bp, synthetic construct
  source 1..15: mol_type = other DNA
gatttatcattgcgc

SEQ ID NO: 9960 - DNA, 15 bp, synthetic construct
  source 1..15: mol_type = other DNA
tcaacacacttcagc

SEQ ID NO: 9961 - DNA, 15 bp, synthetic construct
  source 1..15: mol_type = other DNA
gatgcttgtaactca

SEQ ID NO: 9962 - DNA, 15 bp, synthetic construct
  source 1..15: mol_type = other DNA
ggctacacgttggta

SEQ ID NO: 9963 - DNA, 15 bp, synthetic construct
  source 1..15: mol_type = other DNA
cagtaagctgtaccc

SEQ ID NO: 9964 - DNA, 15 bp, synthetic construct
  source 1..15: mol_type = other DNA
acatgccttggacaa

SEQ ID NO: 9965 - DNA, 15 bp, synthetic construct
  source 1..15: mol_type = other DNA
aagtttcagacttga

SEQ ID NO: 9966 - DNA, 15 bp, synthetic construct
  source 1..15: mol_type = other DNA
gagtaccctcctttg

SEQ ID NO: 9967 - DNA, 15 bp, synthetic construct
  source 1..15: mol_type = other DNA
atctcctttttctgg

SEQ ID NO: 9968 - DNA, 15 bp, synthetic construct
  source 1..15: mol_type = other DNA
taaagaaggcttctg

SEQ ID NO: 9969 - DNA, 15 bp, synthetic construct
  source 1..15: mol_type = other DNA
gaaggaaccttacca

SEQ ID NO: 9970 - DNA, 15 bp, synthetic construct
  source 1..15: mol_type = other DNA
tcttccctacctcac

SEQ ID NO: 9971 - DNA, 15 bp, synthetic construct
  source 1..15: mol_type = other DNA
gggaagaacatcagc

SEQ ID NO: 9972 - DNA, 15 bp, synthetic construct
  source 1..15: mol_type = other DNA
attcctggacctaaa

SEQ ID NO: 9973 - DNA, 15 bp, synthetic construct
  source 1..15: mol_type = other DNA
gaattccttggtctc

SEQ ID NO: 9974 - DNA, 15 bp, synthetic construct
  source 1..15: mol_type = other DNA
ctactacctgttcac

SEQ ID NO: 9975 - DNA, 15 bp, synthetic construct
  source 1..15: mol_type = other DNA
gtcagacaaaaggtg

SEQ ID NO: 9976 - DNA, 15 bp, synthetic construct
  source 1..15: mol_type = other DNA
tgagcttccattttc

SEQ ID NO: 9977 - DNA, 15 bp, synthetic construct
  source 1..15: mol_type = other DNA
tggaaaatgctaagc

SEQ ID NO: 9978 - DNA, 15 bp, synthetic construct
  source 1..15: mol_type = other DNA
tatccaggaattggc

SEQ ID NO: 9979 - DNA, 15 bp, synthetic construct
  source 1..15: mol_type = other DNA
ctcacctcgatcacc

SEQ ID NO: 9980 - DNA, 15 bp, synthetic construct
  source 1..15: mol_type = other DNA
ttcagtactctgcct

SEQ ID NO: 9981 - DNA, 15 bp, synthetic construct
  source 1..15: mol_type = other DNA
acaccacagtcgaga

SEQ ID NO: 9982 - DNA, 15 bp, synthetic construct
  source 1..15: mol_type = other DNA
ggacctcgcaatgcc

SEQ ID NO: 9983 - DNA, 15 bp, synthetic construct
  source 1..15: mol_type = other DNA
ccctagctagtatct

SEQ ID NO: 9984 - DNA, 15 bp, synthetic construct
  source 1..15: mol_type = other DNA
gattagcttcaagcc

SEQ ID NO: 9985 - DNA, 15 bp, synthetic construct
  source 1..15: mol_type = other DNA
gtgaaaccaaggcag

SEQ ID NO: 9986 - DNA, 15 bp, synthetic construct
  source 1..15: mol_type = other DNA
ggaatacactgctag

SEQ ID NO: 9987 - DNA, 15 bp, synthetic construct
  source 1..15: mol_type = other DNA
cactggatagaagtt

SEQ ID NO: 9988 - DNA, 15 bp, synthetic construct
  source 1..15: mol_type = other DNA
aagatctcagtggtg

SEQ ID NO: 9989 - DNA, 15 bp, synthetic construct
  source 1..15: mol_type = other DNA
tgctagaaatctacc

SEQ ID NO: 9990 - DNA, 15 bp, synthetic construct
  source 1..15: mol_type = other DNA
aatacatgatggaca

SEQ ID NO: 9991 - DNA, 15 bp, synthetic construct
  source 1..15: mol_type = other DNA
gtataaagacaaaga

SEQ ID NO: 9992 - DNA, 15 bp, synthetic construct
  source 1..15: mol_type = other DNA
tccaagtctttttat

SEQ ID NO: 9993 - DNA, 15 bp, synthetic construct
  source 1..15: mol_type = other DNA
aagtttggttatgaa

SEQ ID NO: 9994 - DNA, 15 bp, synthetic construct
  source 1..15: mol_type = other DNA
ctttctcatgctgat

SEQ ID NO: 9995 - DNA, 15 bp, synthetic construct
  source 1..15: mol_type = other DNA
aagcccaaattttta

SEQ ID NO: 9996 - DNA, 15 bp, synthetic construct
  source 1..15: mol_type = other DNA
tggattcgtaggttt

SEQ ID NO: 9997 - DNA, 15 bp, synthetic construct
  source 1..15: mol_type = other DNA
gaattccttttaatc

SEQ ID NO: 9998 - DNA, 15 bp, synthetic construct
  source 1..15: mol_type = other DNA
ggtttgaattccttc

SEQ ID NO: 9999 - DNA, 15 bp, synthetic construct
  source 1..15: mol_type = other DNA
aaaaagccctgtcca

SEQ ID NO: 10000 - DNA, 15 bp, synthetic construct
  source 1..15: mol_type = other DNA
cctcctggatcaatt

SEQ ID NO: 10001 - DNA, 15 bp, synthetic construct
  source 1..15: mol_type = other DNA
ggaaggccttttagc

SEQ ID NO: 10002 - DNA, 15 bp, synthetic construct
  source 1..15: mol_type = other DNA
ctctgcctgttagca

SEQ ID NO: 10003 - DNA, 15 bp, synthetic construct
  source 1..15: mol_type = other DNA
gggtgacttgagatt

SEQ ID NO: 10004 - DNA, 15 bp, synthetic construct
  source 1..15: mol_type = other DNA
ggtccatatggcatc

SEQ ID NO: 10005 - DNA, 15 bp, synthetic construct
  source 1..15: mol_type = other DNA
ctgaaggacctacct

SEQ ID NO: 10006 - DNA, 15 bp, synthetic construct
  source 1..15: mol_type = other DNA
ggaagttggtttgct

SEQ ID NO: 10007 - DNA, 15 bp, synthetic construct
  source 1..15: mol_type = other DNA
gtcgactcaggctat

SEQ ID NO: 10008 - DNA, 15 bp, synthetic construct
  source 1..15: mol_type = other DNA
cctacaaggattaac

SEQ ID NO: 10009 - DNA, 15 bp, synthetic construct
  source 1..15: mol_type = other DNA
tcacccttgagtcct

SEQ ID NO: 10010 - DNA, 15 bp, synthetic construct
  source 1..15: mol_type = other DNA
ggtcttttatgttcg

SEQ ID NO: 10011 - DNA, 15 bp, synthetic construct
  source 1..15: mol_type = other DNA
tggcagaggactacc

SEQ ID NO: 10012 - DNA, 15 bp, synthetic construct
  source 1..15: mol_type = other DNA
cctagcacaccgact

SEQ ID NO: 10013 - DNA, 15 bp, synthetic construct
  source 1..15: mol_type = other DNA
ccaaatactactggg

SEQ ID NO: 10014 - DNA, 15 bp, synthetic construct
  source 1..15: mol_type = other DNA
ctgtcctattaaatg

SEQ ID NO: 10015 - DNA, 15 bp, synthetic construct
  source 1..15: mol_type = other DNA
gtgtctgagagcttg

SEQ ID NO: 10016 - DNA, 15 bp, synthetic construct
  source 1..15: mol_type = other DNA
ctgtggtgactgtgt

SEQ ID NO: 10017 - DNA, 15 bp, synthetic construct
  source 1..15: mol_type = other DNA
cataaccactctaca

SEQ ID NO: 10018 - DNA, 15 bp, synthetic construct
  source 1..15: mol_type = other DNA
gtctagggtgatggt

SEQ ID NO: 10019 - DNA, 15 bp, synthetic construct
  source 1..15: mol_type = other DNA
ccggtaatccatcct

SEQ ID NO: 10020 - DNA, 15 bp, synthetic construct
  source 1..15: mol_type = other DNA
aaagcattggtcaca

SEQ ID NO: 10021 - DNA, 15 bp, synthetic construct
  source 1..15: mol_type = other DNA
tctgtagagctaatc

SEQ ID NO: 10022 - DNA, 15 bp, synthetic construct
  source 1..15: mol_type = other DNA
ttctgactactccct

SEQ ID NO: 10023 - DNA, 15 bp, synthetic construct
  source 1..15: mol_type = other DNA
cacttgaaagattcc

SEQ ID NO: 10024 - DNA, 15 bp, synthetic construct
  source 1..15: mol_type = other DNA
ttcgttctatgttgt

SEQ ID NO: 10025 - DNA, 15 bp, synthetic construct
  source 1..15: mol_type = other DNA
tgcttctgtttaggt

SEQ ID NO: 10026 - DNA, 15 bp, synthetic construct
  source 1..15: mol_type = other DNA
catcaggcttataca

SEQ ID NO: 10027 - DNA, 15 bp, synthetic construct
  source 1..15: mol_type = other DNA
tgaatcttgagacca

SEQ ID NO: 10028 - DNA, 15 bp, synthetic construct
  source 1..15: mol_type = other DNA
atatgccacagatag

SEQ ID NO: 10029 - DNA, 15 bp, synthetic construct
  source 1..15: mol_type = other DNA
ctgatctgtgtagga

SEQ ID NO: 10030 - DNA, 15 bp, synthetic construct
  source 1..15: mol_type = other DNA
aaaggcacttctaat

SEQ ID NO: 10031 - DNA, 15 bp, synthetic construct
  source 1..15: mol_type = other DNA
aacaatcgagtaact

SEQ ID NO: 10032 - DNA, 15 bp, synthetic construct
  source 1..15: mol_type = other DNA
ggatgggctttaatg

SEQ ID NO: 10033 - DNA, 15 bp, synthetic construct
  source 1..15: mol_type = other DNA
agattacatgcattt

SEQ ID NO: 10034 - DNA, 15 bp, synthetic construct
  source 1..15: mol_type = other DNA
aagaccagactctct

SEQ ID NO: 10035 - DNA, 15 bp, synthetic construct
  source 1..15: mol_type = other DNA
ctccctttggccatg

SEQ ID NO: 10036 - DNA, 15 bp, synthetic construct
  source 1..15: mol_type = other DNA
acctgattttaggag

SEQ ID NO: 10037 - DNA, 15 bp, synthetic construct
  source 1..15: mol_type = other DNA
atcaagttgcaaaac

SEQ ID NO: 10038 - DNA, 15 bp, synthetic construct
  source 1..15: mol_type = other DNA
ttaattaaaatagcc

SEQ ID NO: 10039 - DNA, 15 bp, synthetic construct
  source 1..15: mol_type = other DNA
tatccatgggaagag

SEQ ID NO: 10040 - DNA, 15 bp, synthetic construct
  source 1..15: mol_type = other DNA
cattggttccccact

SEQ ID NO: 10041 - DNA, 15 bp, synthetic construct
  source 1..15: mol_type = other DNA
accaagaaacatact

SEQ ID NO: 10042 - DNA, 15 bp, synthetic construct
  source 1..15: mol_type = other DNA
ctggagagctggaat

SEQ ID NO: 10043 - DNA, 15 bp, synthetic construct
  source 1..15: mol_type = other DNA
ttggatcctttcttc

SEQ ID NO: 10044 - DNA, 15 bp, synthetic construct
  source 1..15: mol_type = other DNA
caccctttggcagtg

SEQ ID NO: 10045 - DNA, 15 bp, synthetic construct
  source 1..15: mol_type = other DNA
atttcttgcagcata

SEQ ID NO: 10046 - DNA, 15 bp, synthetic construct
  source 1..15: mol_type = other DNA
agggcattttgcttc

SEQ ID NO: 10047 - DNA, 15 bp, synthetic construct
  source 1..15: mol_type = other DNA
gggttaaccaaacca

SEQ ID NO: 10048 - DNA, 15 bp, synthetic construct
  source 1..15: mol_type = other DNA
agacagctagaatct

SEQ ID NO: 10049 - DNA, 15 bp, synthetic construct
  source 1..15: mol_type = other DNA
gtgaacactgtgatc

SEQ ID NO: 10050 - DNA, 15 bp, synthetic construct
  source 1..15: mol_type = other DNA
attggacaactggaa

SEQ ID NO: 10051 - DNA, 15 bp, synthetic construct
  source 1..15: mol_type = other DNA
cttcaactgtctaga

SEQ ID NO: 10052 - DNA, 15 bp, synthetic construct
  source 1..15: mol_type = other DNA
tgtttttgtccctat

SEQ ID NO: 10053 - DNA, 15 bp, synthetic construct
  source 1..15: mol_type = other DNA
cttatagcctactca

SEQ ID NO: 10054 - DNA, 15 bp, synthetic construct
  source 1..15: mol_type = other DNA
ttttgccccttagta

SEQ ID NO: 10055 - DNA, 15 bp, synthetic construct
  source 1..15: mol_type = other DNA
ttgaaataaaatgca

SEQ ID NO: 10056 - DNA, 15 bp, synthetic construct
  source 1..15: mol_type = other DNA
tttaatagcatgctt

SEQ ID NO: 10057 - DNA, 15 bp, synthetic construct
  source 1..15: mol_type = other DNA
caaaatatgaggcag

SEQ ID NO: 10058 - DNA, 15 bp, synthetic construct
  source 1..15: mol_type = other DNA
actgcagtaggaatc

SEQ ID NO: 10059 - DNA, 15 bp, synthetic construct
  source 1..15: mol_type = other DNA
ctttacatttgtggc

SEQ ID NO: 10060 - DNA, 15 bp, synthetic construct
  source 1..15: mol_type = other DNA
tgagaagtattaatg

SEQ ID NO: 10061 - DNA, 15 bp, synthetic construct
  source 1..15: mol_type = other DNA
tccatgaggtcataa

SEQ ID NO: 10062 - DNA, 15 bp, synthetic construct
  source 1..15: mol_type = other DNA
aggtctgctgggaca

SEQ ID NO: 10063 - DNA, 15 bp, synthetic construct
  source 1..15: mol_type = other DNA
aaccccctaacataa

SEQ ID NO: 10064 - DNA, 15 bp, synthetic construct
  source 1..15: mol_type = other DNA
tacttctgtcactgc

SEQ ID NO: 10065 - DNA, 15 bp, synthetic construct
  source 1..15: mol_type = other DNA
agtgacagaagtacc

SEQ ID NO: 10066 - DNA, 15 bp, synthetic construct
  source 1..15: mol_type = other DNA
gtttagtttcttcca

SEQ ID NO: 10067 - DNA, 15 bp, synthetic construct
  source 1..15: mol_type = other DNA
ccagatcttatacgt

SEQ ID NO: 10068 - DNA, 15 bp, synthetic construct
  source 1..15: mol_type = other DNA
attgttactcattag

SEQ ID NO: 10069 - DNA, 15 bp, synthetic construct
  source 1..15: mol_type = other DNA
gtcaattggttagag

SEQ ID NO: 10070 - DNA, 15 bp, synthetic construct
  source 1..15: mol_type = other DNA
gtcaacgccaaaagg

SEQ ID NO: 10071 - DNA, 15 bp, synthetic construct
  source 1..15: mol_type = other DNA
gagctgtaagtcaga

SEQ ID NO: 10072 - DNA, 15 bp, synthetic construct
  source 1..15: mol_type = other DNA
ggattcatttcactt

SEQ ID NO: 10073 - DNA, 15 bp, synthetic construct
  source 1..15: mol_type = other DNA
aaatgaccttacctt

SEQ ID NO: 10074 - DNA, 15 bp, synthetic construct
  source 1..15: mol_type = other DNA
tgtttcatttacata

SEQ ID NO: 10075 - DNA, 15 bp, synthetic construct
  source 1..15: mol_type = other DNA
gctttcagtctcaat

SEQ ID NO: 10076 - DNA, 15 bp, synthetic construct
  source 1..15: mol_type = other DNA
gtttccaccaacaaa

SEQ ID NO: 10077 - DNA, 15 bp, synthetic construct
  source 1..15: mol_type = other DNA
tgcaattgttaactt

SEQ ID NO: 10078 - DNA, 15 bp, synthetic construct
  source 1..15: mol_type = other DNA
gtattctcatatact

SEQ ID NO: 10079 - DNA, 15 bp, synthetic construct
  source 1..15: mol_type = other DNA
tccaaatctattcta

SEQ ID NO: 10080 - DNA, 15 bp, synthetic construct
  source 1..15: mol_type = other DNA
gaaaagcgacataac

SEQ ID NO: 10081 - DNA, 15 bp, synthetic construct
  source 1..15: mol_type = other DNA
cctgtaagtagcatt

SEQ ID NO: 10082 - DNA, 15 bp, synthetic construct
  source 1..15: mol_type = other DNA
aagacactatatccc

SEQ ID NO: 10083 - DNA, 15 bp, synthetic construct
  source 1..15: mol_type = other DNA
ttaaagttggagcca

SEQ ID NO: 10084 - DNA, 15 bp, synthetic construct
  source 1..15: mol_type = other DNA
agaacaccaaagcaa

SEQ ID NO: 10085 - DNA, 15 bp, synthetic construct
  source 1..15: mol_type = other DNA
tgaactttttggcaa

SEQ ID NO: 10086 - DNA, 15 bp, synthetic construct
  source 1..15: mol_type = other DNA
tctcactacatttct

SEQ ID NO: 10087 - DNA, 15 bp, synthetic construct
  source 1..15: mol_type = other DNA
tgacgctacagcagt

SEQ ID NO: 10088 - DNA, 15 bp, synthetic construct
  source 1..15: mol_type = other DNA
cacaacttctagaaa

SEQ ID NO: 10089 - DNA, 15 bp, synthetic construct
  source 1..15: mol_type = other DNA
tttctggttttgctg

SEQ ID NO: 10090 - DNA, 15 bp, synthetic construct
  source 1..15: mol_type = other DNA
taaaggttgagggat

SEQ ID NO: 10091 - DNA, 15 bp, synthetic construct
  source 1..15: mol_type = other DNA
tttctggttttgctg

SEQ ID NO: 10092 - DNA, 15 bp, synthetic construct
  source 1..15: mol_type = other DNA
taaaggttgagggat

SEQ ID NO: 10093 - DNA, 15 bp, synthetic construct
  source 1..15: mol_type = other DNA
acaagtgagactttg

SEQ ID NO: 10094 - DNA, 15 bp, synthetic construct
  source 1..15: mol_type = other DNA
cattatgttttcaag

SEQ ID NO: 10095 - DNA, 15 bp, synthetic construct
  source 1..15: mol_type = other DNA
gctttttcacacctt

SEQ ID NO: 10096 - DNA, 15 bp, synthetic construct
  source 1..15: mol_type = other DNA
cctggaaatttaagc

SEQ ID NO: 10097 - DNA, 15 bp, synthetic construct
  source 1..15: mol_type = other DNA
gctttttcacacctt

SEQ ID NO: 10098 - DNA, 15 bp, synthetic construct
  source 1..15: mol_type = other DNA
cctggaaatttaagc

SEQ ID NO: 10099 - DNA, 15 bp, synthetic construct
  source 1..15: mol_type = other DNA
gctttttcacacctt

SEQ ID NO: 10100 - DNA, 15 bp, synthetic construct
  source 1..15: mol_type = other DNA
cctggaaatttaagc

SEQ ID NO: 10101 - DNA, 15 bp, synthetic construct
  source 1..15: mol_type = other DNA
tcttactgtcagtga

SEQ ID NO: 10102 - DNA, 15 bp, synthetic construct
  source 1..15: mol_type = other DNA
aagataaaataagac

SEQ ID NO: 10103 - DNA, 15 bp, synthetic construct
  source 1..15: mol_type = other DNA
tcttactgtcagtga

SEQ ID NO: 10104 - DNA, 15 bp, synthetic construct
  source 1..15: mol_type = other DNA
aagataaaataagac

SEQ ID NO: 10105 - DNA, 15 bp, synthetic construct
  source 1..15: mol_type = other DNA
tctttttgtagtcat

SEQ ID NO: 10106 - DNA, 15 bp, synthetic construct
  source 1..15: mol_type = other DNA
attgacttcctccct

SEQ ID NO: 10107 - DNA, 15 bp, synthetic construct
  source 1..15: mol_type = other DNA
tgtagctgtggttca

SEQ ID NO: 10108 - DNA, 15 bp, synthetic construct
  source 1..15: mol_type = other DNA
gttcatgggatactg

SEQ ID NO: 10109 - DNA, 15 bp, synthetic construct
  source 1..15: mol_type = other DNA
atcccatgaaccatt

SEQ ID NO: 10110 - DNA, 15 bp, synthetic construct
  source 1..15: mol_type = other DNA
ggcttggactatatt

SEQ ID NO: 10111 - DNA, 15 bp, synthetic construct
  source 1..15: mol_type = other DNA
aataaagcttgttat

SEQ ID NO: 10112 - DNA, 15 bp, synthetic construct
  source 1..15: mol_type = other DNA
tttccagaccccaca

SEQ ID NO: 10113 - DNA, 15 bp, synthetic construct
  source 1..15: mol_type = other DNA
taagttctgaaagtt

SEQ ID NO: 10114 - DNA, 15 bp, synthetic construct
  source 1..15: mol_type = other DNA
gaagaaaaggattat

SEQ ID NO: 10115 - DNA, 15 bp, synthetic construct
  source 1..15: mol_type = other DNA
ttgtttcattacttc

SEQ ID NO: 10116 - DNA, 15 bp, synthetic construct
  source 1..15: mol_type = other DNA
acaaaaatgataatg

SEQ ID NO: 10117 - DNA, 15 bp, synthetic construct
  source 1..15: mol_type = other DNA
aggagaacaaggctt

SEQ ID NO: 10118 - DNA, 15 bp, synthetic construct
  source 1..15: mol_type = other DNA
taagaacaaggccat

SEQ ID NO: 10119 - DNA, 15 bp, synthetic construct
  source 1..15: mol_type = other DNA
aaagtaacatctcta

SEQ ID NO: 10120 - DNA, 15 bp, synthetic construct
  source 1..15: mol_type = other DNA
gtggtccttcatcac

SEQ ID NO: 10121 - DNA, 15 bp, synthetic construct
  source 1..15: mol_type = other DNA
ttatgggtcctcctg

SEQ ID NO: 10122 - DNA, 15 bp, synthetic construct
  source 1..15: mol_type = other DNA
tgaggccaaccttta

SEQ ID NO: 10123 - DNA, 15 bp, synthetic construct
  source 1..15: mol_type = other DNA
tttttctggcttgtc

SEQ ID NO: 10124 - DNA, 15 bp, synthetic construct
  source 1..15: mol_type = other DNA
gatttgaaagaatga

SEQ ID NO: 10125 - DNA, 15 bp, synthetic construct
  source 1..15: mol_type = other DNA
gcttctccaatcaca

SEQ ID NO: 10126 - DNA, 15 bp, synthetic construct
  source 1..15: mol_type = other DNA
ggttaccctgaggca

SEQ ID NO: 10127 - DNA, 15 bp, synthetic construct
  source 1..15: mol_type = other DNA
gcttctccaatcaca

SEQ ID NO: 10128 - DNA, 15 bp, synthetic construct
  source 1..15: mol_type = other DNA
ggttaccctgaggca

SEQ ID NO: 10129 - DNA, 15 bp, synthetic construct
  source 1..15: mol_type = other DNA
ttctgtatgagcttt

SEQ ID NO: 10130 - DNA, 15 bp, synthetic construct
  source 1..15: mol_type = other DNA
tgccttccttctact

SEQ ID NO: 10131 - DNA, 15 bp, synthetic construct
  source 1..15: mol_type = other DNA
agccctttgtacatt

SEQ ID NO: 10132 - DNA, 15 bp, synthetic construct
  source 1..15: mol_type = other DNA
tggaaaagtgaggat

SEQ ID NO: 10133 - DNA, 15 bp, synthetic construct
  source 1..15: mol_type = other DNA
gatctaaaggtgaac

SEQ ID NO: 10134 - DNA, 15 bp, synthetic construct
  source 1..15: mol_type = other DNA
ttatctcagcatcag

SEQ ID NO: 10135 - DNA, 15 bp, synthetic construct
  source 1..15: mol_type = other DNA
acagatagttgttgt

SEQ ID NO: 10136 - DNA, 15 bp, synthetic construct
  source 1..15: mol_type = other DNA
aaacaaaacacagta

SEQ ID NO: 10137 - DNA, 15 bp, synthetic construct
  source 1..15: mol_type = other DNA
tccacaaccattcac

SEQ ID NO: 10138 - DNA, 15 bp, synthetic construct
  source 1..15: mol_type = other DNA
agtggaagatgcact

SEQ ID NO: 10139 - DNA, 15 bp, synthetic construct
  source 1..15: mol_type = other DNA
tgatttactcttgct

SEQ ID NO: 10140 - DNA, 15 bp, synthetic construct
  source 1..15: mol_type = other DNA
cggtgttgaagttac

SEQ ID NO: 10141 - DNA, 15 bp, synthetic construct
  source 1..15: mol_type = other DNA
tctttctttgaacgt

SEQ ID NO: 10142 - DNA, 15 bp, synthetic construct
  source 1..15: mol_type = other DNA
tctaacctactctgc

SEQ ID NO: 10143 - DNA, 15 bp, synthetic construct
  source 1..15: mol_type = other DNA
tctttctttgaacgt

SEQ ID NO: 10144 - DNA, 15 bp, synthetic construct
  source 1..15: mol_type = other DNA
tctaacctactctgc

SEQ ID NO: 10145 - DNA, 15 bp, synthetic construct
  source 1..15: mol_type = other DNA
catcttactgttgtc

SEQ ID NO: 10146 - DNA, 15 bp, synthetic construct
  source 1..15: mol_type = other DNA
agataagaaaatgag

SEQ ID NO: 10147 - DNA, 15 bp, synthetic construct
  source 1..15: mol_type = other DNA
tctccccccatggaa

SEQ ID NO: 10148 - DNA, 15 bp, synthetic construct
  source 1..15: mol_type = other DNA
gtcctgggaaaccac

SEQ ID NO: 10149 - DNA, 15 bp, synthetic construct
  source 1..15: mol_type = other DNA
tctccccccatggaa

SEQ ID NO: 10150 - DNA, 15 bp, synthetic construct
  source 1..15: mol_type = other DNA
gtcctgggaaaccac

SEQ ID NO: 10151 - DNA, 15 bp, synthetic construct
  source 1..15: mol_type = other DNA
tctccccccatggaa

SEQ ID NO: 10152 - DNA, 15 bp, synthetic construct
  source 1..15: mol_type = other DNA
gtcctgggaaaccac

SEQ ID NO: 10153 - DNA, 15 bp, synthetic construct
  source 1..15: mol_type = other DNA
tcatgggagtttttg

SEQ ID NO: 10154 - DNA, 15 bp, synthetic construct
  source 1..15: mol_type = other DNA
aaggtgtcaatttct

SEQ ID NO: 10155 - DNA, 15 bp, synthetic construct
  source 1..15: mol_type = other DNA
tcatgggagtttttg

SEQ ID NO: 10156 - DNA, 15 bp, synthetic construct
  source 1..15: mol_type = other DNA
aaggtgtcaatttct

SEQ ID NO: 10157 - DNA, 15 bp, synthetic construct
  source 1..15: mol_type = other DNA
aatagtaaaataaag

SEQ ID NO: 10158 - DNA, 15 bp, synthetic construct
  source 1..15: mol_type = other DNA
agaaacctacttact

SEQ ID NO: 10159 - DNA, 15 bp, synthetic construct
  source 1..15: mol_type = other DNA
aatagtaaaataaag

SEQ ID NO: 10160 - DNA, 15 bp, synthetic construct
  source 1..15: mol_type = other DNA
agaaacctacttact

SEQ ID NO: 10161 - DNA, 15 bp, synthetic construct
  source 1..15: mol_type = other DNA
caaggactagtgact

SEQ ID NO: 10162 - DNA, 15 bp, synthetic construct
  source 1..15: mol_type = other DNA
tgtaggtttcacttt

SEQ ID NO: 10163 - DNA, 15 bp, synthetic construct
  source 1..15: mol_type = other DNA
gttatctacagggtt

SEQ ID NO: 10164 - DNA, 15 bp, synthetic construct
  source 1..15: mol_type = other DNA
cctggaggtcctata

SEQ ID NO: 10165 - DNA, 15 bp, synthetic construct
  source 1..15: mol_type = other DNA
aataccaggagagaa

SEQ ID NO: 10166 - DNA, 15 bp, synthetic construct
  source 1..15: mol_type = other DNA
ctagaaaagtgtaac

SEQ ID NO: 10167 - DNA, 15 bp, synthetic construct
  source 1..15: mol_type = other DNA
aaaaagtctaaaact

SEQ ID NO: 10168 - DNA, 15 bp, synthetic construct
  source 1..15: mol_type = other DNA
ctcacatacgtctgg

SEQ ID NO: 10169 - DNA, 15 bp, synthetic construct
  source 1..15: mol_type = other DNA
actcaactatgaaac

SEQ ID NO: 10170 - DNA, 15 bp, synthetic construct
  source 1..15: mol_type = other DNA
actcacctggtaagc

SEQ ID NO: 10171 - DNA, 15 bp, synthetic construct
  source 1..15: mol_type = other DNA
gtaaaggagagcctg

SEQ ID NO: 10172 - DNA, 15 bp, synthetic construct
  source 1..15: mol_type = other DNA
gtatgaatgaagtga

SEQ ID NO: 10173 - DNA, 15 bp, synthetic construct
  source 1..15: mol_type = other DNA
tttgccaaagttatt

SEQ ID NO: 10174 - DNA, 15 bp, synthetic construct
  source 1..15: mol_type = other DNA
catcttcaaacatga

SEQ ID NO: 10175 - DNA, 15 bp, synthetic construct
  source 1..15: mol_type = other DNA
tcccatgaaaccaga

SEQ ID NO: 10176 - DNA, 15 bp, synthetic construct
  source 1..15: mol_type = other DNA
attctatcaacacca

SEQ ID NO: 10177 - DNA, 15 bp, synthetic construct
  source 1..15: mol_type = other DNA
tcttagataatccac

SEQ ID NO: 10178 - DNA, 15 bp, synthetic construct
  source 1..15: mol_type = other DNA
ctcaagtatgtgcct

SEQ ID NO: 10179 - DNA, 15 bp, synthetic construct
  source 1..15: mol_type = other DNA
ttactggagtgcctg

SEQ ID NO: 10180 - DNA, 15 bp, synthetic construct
  source 1..15: mol_type = other DNA
ttacctgggaatcca

SEQ ID NO: 10181 - DNA, 15 bp, synthetic construct
  source 1..15: mol_type = other DNA
ttctgtgggagatcc

SEQ ID NO: 10182 - DNA, 15 bp, synthetic construct
  source 1..15: mol_type = other DNA
ggtaaagagatagtt

SEQ ID NO: 10183 - DNA, 15 bp, synthetic construct
  source 1..15: mol_type = other DNA
tctatgctagcacta

SEQ ID NO: 10184 - DNA, 15 bp, synthetic construct
  source 1..15: mol_type = other DNA
acatgatttgacttt

SEQ ID NO: 10185 - DNA, 15 bp, synthetic construct
  source 1..15: mol_type = other DNA
tctatgctagcacta

SEQ ID NO: 10186 - DNA, 15 bp, synthetic construct
  source 1..15: mol_type = other DNA
acatgatttgacttt

SEQ ID NO: 10187 - DNA, 15 bp, synthetic construct
  source 1..15: mol_type = other DNA
aagggagcatatgga

SEQ ID NO: 10188 - DNA, 15 bp, synthetic construct
  source 1..15: mol_type = other DNA
gggtaataaaaaggc

SEQ ID NO: 10189 - DNA, 15 bp, synthetic construct
  source 1..15: mol_type = other DNA
aaacctcaatgatct

SEQ ID NO: 10190 - DNA, 15 bp, synthetic construct
  source 1..15: mol_type = other DNA
gttcttacatgcatt

SEQ ID NO: 10191 - DNA, 15 bp, synthetic construct
  source 1..15: mol_type = other DNA
cggtattatttatct

SEQ ID NO: 10192 - DNA, 15 bp, synthetic construct
  source 1..15: mol_type = other DNA
ctcctaccactcacg

SEQ ID NO: 10193 - DNA, 15 bp, synthetic construct
  source 1..15: mol_type = other DNA
tgctactcttaacac

SEQ ID NO: 10194 - DNA, 15 bp, synthetic construct
  source 1..15: mol_type = other DNA
acaaacacccacatt

SEQ ID NO: 10195 - DNA, 15 bp, synthetic construct
  source 1..15: mol_type = other DNA
acaaacacccacatt

SEQ ID NO: 10196 - DNA, 15 bp, synthetic construct
  source 1..15: mol_type = other DNA
tcagaaaatggctat

SEQ ID NO: 10197 - DNA, 15 bp, synthetic construct
  source 1..15: mol_type = other DNA
ttgactgggtaaagg

SEQ ID NO: 10198 - DNA, 15 bp, synthetic construct
  source 1..15: mol_type = other DNA
gcctcagttgttggg

SEQ ID NO: 10199 - DNA, 15 bp, synthetic construct
  source 1..15: mol_type = other DNA
ttaggtcactttggc

SEQ ID NO: 10200 - DNA, 15 bp, synthetic construct
  source 1..15: mol_type = other DNA
agaaattaaaagtat

SEQ ID NO: 10201 - DNA, 15 bp, synthetic construct
  source 1..15: mol_type = other DNA
tcctagatctgtcca

SEQ ID NO: 10202 - DNA, 15 bp, synthetic construct
  source 1..15: mol_type = other DNA
cacagctctaagtgg

SEQ ID NO: 10203 - DNA, 15 bp, synthetic construct
  source 1..15: mol_type = other DNA
gtggatcagagctta

SEQ ID NO: 10204 - DNA, 15 bp, synthetic construct
  source 1..15: mol_type = other DNA
gtgggctcttttatt

SEQ ID NO: 10205 - DNA, 15 bp, synthetic construct
  source 1..15: mol_type = other DNA
atttcttattacacg

SEQ ID NO: 10206 - DNA, 15 bp, synthetic construct
  source 1..15: mol_type = other DNA
tttcaattcggaagc

SEQ ID NO: 10207 - DNA, 15 bp, synthetic construct
  source 1..15: mol_type = other DNA
tccctaggcctaaga

SEQ ID NO: 10208 - DNA, 15 bp, synthetic construct
  source 1..15: mol_type = other DNA
atgcatcttataaac

SEQ ID NO: 10209 - DNA, 15 bp, synthetic construct
  source 1..15: mol_type = other DNA
cattatcacgcagtc

SEQ ID NO: 10210 - DNA, 15 bp, synthetic construct
  source 1..15: mol_type = other DNA
agtcacagctaaatc

SEQ ID NO: 10211 - DNA, 15 bp, synthetic construct
  source 1..15: mol_type = other DNA
atactaagaaggctt

SEQ ID NO: 10212 - DNA, 15 bp, synthetic construct
  source 1..15: mol_type = other DNA
tggaatggacagtca

SEQ ID NO: 10213 - DNA, 15 bp, synthetic construct
  source 1..15: mol_type = other DNA
atttcttcccaatat

SEQ ID NO: 10214 - DNA, 15 bp, synthetic construct
  source 1..15: mol_type = other DNA
ccaaattcaaatcta

SEQ ID NO: 10215 - DNA, 15 bp, synthetic construct
  source 1..15: mol_type = other DNA
atttcttcccaatat

SEQ ID NO: 10216 - DNA, 15 bp, synthetic construct
  source 1..15: mol_type = other DNA
ccaaattcaaatcta

SEQ ID NO: 10217 - DNA, 15 bp, synthetic construct
  source 1..15: mol_type = other DNA
atttcttcccaatat

SEQ ID NO: 10218 - DNA, 15 bp, synthetic construct
  source 1..15: mol_type = other DNA
ccaaattcaaatcta

SEQ ID NO: 10219 - DNA, 15 bp, synthetic construct
  source 1..15: mol_type = other DNA
tatggcacatgggta

SEQ ID NO: 10220 - DNA, 15 bp, synthetic construct
  source 1..15: mol_type = other DNA
gaagctttggacctg

SEQ ID NO: 10221 - DNA, 15 bp, synthetic construct
  source 1..15: mol_type = other DNA
gagctacttaacaca

SEQ ID NO: 10222 - DNA, 15 bp, synthetic construct
  source 1..15: mol_type = other DNA
tgcatcctaggaatt

SEQ ID NO: 10223 - DNA, 15 bp, synthetic construct
  source 1..15: mol_type = other DNA
ctgagtgctgattgg

SEQ ID NO: 10224 - DNA, 15 bp, synthetic construct
  source 1..15: mol_type = other DNA
cagtatcgggaagat

SEQ ID NO: 10225 - DNA, 15 bp, synthetic construct
  source 1..15: mol_type = other DNA
gcgcggagctgttcc

SEQ ID NO: 10226 - DNA, 15 bp, synthetic construct
  source 1..15: mol_type = other DNA
tgggccacccggttg

SEQ ID NO: 10227 - DNA, 15 bp, synthetic construct
  source 1..15: mol_type = other DNA
acccttgactagcgc

SEQ ID NO: 10228 - DNA, 15 bp, synthetic construct
  source 1..15: mol_type = other DNA
gaatcaggtggttac

SEQ ID NO: 10229 - DNA, 15 bp, synthetic construct
  source 1..15: mol_type = other DNA
gagggtatggagatg

SEQ ID NO: 10230 - DNA, 15 bp, synthetic construct
  source 1..15: mol_type = other DNA
agaggcttggaagtt

SEQ ID NO: 10231 - DNA, 15 bp, synthetic construct
  source 1..15: mol_type = other DNA
agcatccttttaggc

SEQ ID NO: 10232 - DNA, 15 bp, synthetic construct
  source 1..15: mol_type = other DNA
ttgaacacatctgaa

SEQ ID NO: 10233 - DNA, 15 bp, synthetic construct
  source 1..15: mol_type = other DNA
gtttcctaggttaat

SEQ ID NO: 10234 - DNA, 15 bp, synthetic construct
  source 1..15: mol_type = other DNA
tcttagagaaagtat

SEQ ID NO: 10235 - DNA, 15 bp, synthetic construct
  source 1..15: mol_type = other DNA
tagtgactgagagaa

SEQ ID NO: 10236 - DNA, 15 bp, synthetic construct
  source 1..15: mol_type = other DNA
gaaaagatggtaaaa

SEQ ID NO: 10237 - DNA, 15 bp, synthetic construct
  source 1..15: mol_type = other DNA
gaccttcttctgtta

SEQ ID NO: 10238 - DNA, 15 bp, synthetic construct
  source 1..15: mol_type = other DNA
attccactcccgttg

SEQ ID NO: 10239 - DNA, 15 bp, synthetic construct
  source 1..15: mol_type = other DNA
atggcttttggctat

SEQ ID NO: 10240 - DNA, 15 bp, synthetic construct
  source 1..15: mol_type = other DNA
aatctacatcaccat

SEQ ID NO: 10241 - DNA, 15 bp, synthetic construct
  source 1..15: mol_type = other DNA
tggatgttagatttt

SEQ ID NO: 10242 - DNA, 15 bp, synthetic construct
  source 1..15: mol_type = other DNA
ataaatgagagattc

SEQ ID NO: 10243 - DNA, 15 bp, synthetic construct
  source 1..15: mol_type = other DNA
gaaaacatatttgcc

SEQ ID NO: 10244 - DNA, 15 bp, synthetic construct
  source 1..15: mol_type = other DNA
acactaacctgaaag

SEQ ID NO: 10245 - DNA, 15 bp, synthetic construct
  source 1..15: mol_type = other DNA
tcatcaaacatatcc

SEQ ID NO: 10246 - DNA, 15 bp, synthetic construct
  source 1..15: mol_type = other DNA
aagggaaactgtagc

SEQ ID NO: 10247 - DNA, 15 bp, synthetic construct
  source 1..15: mol_type = other DNA
gtatggaagcgaaaa

SEQ ID NO: 10248 - DNA, 15 bp, synthetic construct
  source 1..15: mol_type = other DNA
atgtaaatgaacacc

SEQ ID NO: 10249 - DNA, 15 bp, synthetic construct
  source 1..15: mol_type = other DNA
tgggacaggaggtag

SEQ ID NO: 10250 - DNA, 15 bp, synthetic construct
  source 1..15: mol_type = other DNA
aataactcccggtga

SEQ ID NO: 10251 - DNA, 15 bp, synthetic construct
  source 1..15: mol_type = other DNA
tgggacattagaaat

SEQ ID NO: 10252 - DNA, 15 bp, synthetic construct
  source 1..15: mol_type = other DNA
aacaagcaactgaac

SEQ ID NO: 10253 - DNA, 15 bp, synthetic construct
  source 1..15: mol_type = other DNA
gttgcttgttctgtg

SEQ ID NO: 10254 - DNA, 15 bp, synthetic construct
  source 1..15: mol_type = other DNA
caggtgagttaacca

SEQ ID NO: 10255 - DNA, 15 bp, synthetic construct
  source 1..15: mol_type = other DNA
atcaataatctaccc

SEQ ID NO: 10256 - DNA, 15 bp, synthetic construct
  source 1..15: mol_type = other DNA
catctcccatctagg

SEQ ID NO: 10257 - DNA, 15 bp, synthetic construct
  source 1..15: mol_type = other DNA
ggcttatcaacctga

SEQ ID NO: 10258 - DNA, 15 bp, synthetic construct
  source 1..15: mol_type = other DNA
ccttaccaatatgga

SEQ ID NO: 10259 - DNA, 15 bp, synthetic construct
  source 1..15: mol_type = other DNA
cacggttctttggga

SEQ ID NO: 10260 - DNA, 15 bp, synthetic construct
  source 1..15: mol_type = other DNA
ttaccccaatatgga

SEQ ID NO: 10261 - DNA, 15 bp, synthetic construct
  source 1..15: mol_type = other DNA
atgttaatcagctta

SEQ ID NO: 10262 - DNA, 15 bp, synthetic construct
  source 1..15: mol_type = other DNA
acggacagcatttgg

SEQ ID NO: 10263 - DNA, 15 bp, synthetic construct
  source 1..15: mol_type = other DNA
gctagaaggatataa

SEQ ID NO: 10264 - DNA, 15 bp, synthetic construct
  source 1..15: mol_type = other DNA
ccacgttgctatgta

SEQ ID NO: 10265 - DNA, 15 bp, synthetic construct
  source 1..15: mol_type = other DNA
acttacttcccctac

SEQ ID NO: 10266 - DNA, 15 bp, synthetic construct
  source 1..15: mol_type = other DNA
gagacaatggtaaag

SEQ ID NO: 10267 - DNA, 15 bp, synthetic construct
  source 1..15: mol_type = other DNA
ttgcttaatgatttt

SEQ ID NO: 10268 - DNA, 15 bp, synthetic construct
  source 1..15: mol_type = other DNA
gtaatttccactgat

SEQ ID NO: 10269 - DNA, 15 bp, synthetic construct
  source 1..15: mol_type = other DNA
tggacatttctcttg

SEQ ID NO: 10270 - DNA, 15 bp, synthetic construct
  source 1..15: mol_type = other DNA
tatgtcttgggacag

SEQ ID NO: 10271 - DNA, 15 bp, synthetic construct
  source 1..15: mol_type = other DNA
gactttcttttcctg

SEQ ID NO: 10272 - DNA, 15 bp, synthetic construct
  source 1..15: mol_type = other DNA
tcaatgacttgactg

SEQ ID NO: 10273 - DNA, 15 bp, synthetic construct
  source 1..15: mol_type = other DNA
ttttacctgcatgac

SEQ ID NO: 10274 - DNA, 15 bp, synthetic construct
  source 1..15: mol_type = other DNA
cttccaaagttgtag

SEQ ID NO: 10275 - DNA, 15 bp, synthetic construct
  source 1..15: mol_type = other DNA
gatccttgggtaatc

SEQ ID NO: 10276 - DNA, 15 bp, synthetic construct
  source 1..15: mol_type = other DNA
caaatataggtgcga

SEQ ID NO: 10277 - DNA, 15 bp, synthetic construct
  source 1..15: mol_type = other DNA
ttgacttaagttgat

SEQ ID NO: 10278 - DNA, 15 bp, synthetic construct
  source 1..15: mol_type = other DNA
ctggctctgtaaaac

SEQ ID NO: 10279 - DNA, 15 bp, synthetic construct
  source 1..15: mol_type = other DNA
aagttcctcttactt

SEQ ID NO: 10280 - DNA, 15 bp, synthetic construct
  source 1..15: mol_type = other DNA
atatgcagtaaggta

SEQ ID NO: 10281 - DNA, 15 bp, synthetic construct
  source 1..15: mol_type = other DNA
tttgcttaggttatg

SEQ ID NO: 10282 - DNA, 15 bp, synthetic construct
  source 1..15: mol_type = other DNA
tttttaaatcattct

SEQ ID NO: 10283 - DNA, 15 bp, synthetic construct
  source 1..15: mol_type = other DNA
tcgaggaagaccaca

SEQ ID NO: 10284 - DNA, 15 bp, synthetic construct
  source 1..15: mol_type = other DNA
tgcatttcaaatcct

SEQ ID NO: 10285 - DNA, 15 bp, synthetic construct
  source 1..15: mol_type = other DNA
acatttgggtcagca

SEQ ID NO: 10286 - DNA, 15 bp, synthetic construct
  source 1..15: mol_type = other DNA
cacactgtgcagacc

SEQ ID NO: 10287 - DNA, 15 bp, synthetic construct
  source 1..15: mol_type = other DNA
ttatttctacttttt

SEQ ID NO: 10288 - DNA, 15 bp, synthetic construct
  source 1..15: mol_type = other DNA
gtctgactgttgatg

SEQ ID NO: 10289 - DNA, 15 bp, synthetic construct
  source 1..15: mol_type = other DNA
atagatttctctaga

SEQ ID NO: 10290 - DNA, 15 bp, synthetic construct
  source 1..15: mol_type = other DNA
cagcttctatagtgc

SEQ ID NO: 10291 - DNA, 15 bp, synthetic construct
  source 1..15: mol_type = other DNA
gttcttgtccattcc

SEQ ID NO: 10292 - DNA, 15 bp, synthetic construct
  source 1..15: mol_type = other DNA
caagaatgtctttaa

SEQ ID NO: 10293 - DNA, 15 bp, synthetic construct
  source 1..15: mol_type = other DNA
tagtggtttttgacc

SEQ ID NO: 10294 - DNA, 15 bp, synthetic construct
  source 1..15: mol_type = other DNA
gttatgtgcccattc

SEQ ID NO: 10295 - DNA, 15 bp, synthetic construct
  source 1..15: mol_type = other DNA
cttcggctggataag

SEQ ID NO: 10296 - DNA, 15 bp, synthetic construct
  source 1..15: mol_type = other DNA
atagctttgttctgc

SEQ ID NO: 10297 - DNA, 15 bp, synthetic construct
  source 1..15: mol_type = other DNA
tagatcatgcagagc

SEQ ID NO: 10298 - DNA, 15 bp, synthetic construct
  source 1..15: mol_type = other DNA
ctacaataacatact

SEQ ID NO: 10299 - DNA, 15 bp, synthetic construct
  source 1..15: mol_type = other DNA
ttctcatttctctcc

SEQ ID NO: 10300 - DNA, 15 bp, synthetic construct
  source 1..15: mol_type = other DNA
ggagattgacaagta

SEQ ID NO: 10301 - DNA, 15 bp, synthetic construct
  source 1..15: mol_type = other DNA
tgccattcacaagtt

SEQ ID NO: 10302 - DNA, 15 bp, synthetic construct
  source 1..15: mol_type = other DNA
tcactaggatcttcc

SEQ ID NO: 10303 - DNA, 15 bp, synthetic construct
  source 1..15: mol_type = other DNA
gatcagttgtgttga

SEQ ID NO: 10304 - DNA, 15 bp, synthetic construct
  source 1..15: mol_type = other DNA
tcaatgtagatgaca

SEQ ID NO: 10305 - DNA, 15 bp, synthetic construct
  source 1..15: mol_type = other DNA
ggaaacaggctgtca

SEQ ID NO: 10306 - DNA, 15 bp, synthetic construct
  source 1..15: mol_type = other DNA
tggattttcatgctt

SEQ ID NO: 10307 - DNA, 15 bp, synthetic construct
  source 1..15: mol_type = other DNA
atgatgccactaagc

SEQ ID NO: 10308 - DNA, 15 bp, synthetic construct
  source 1..15: mol_type = other DNA
agagatcctgcttac

SEQ ID NO: 10309 - DNA, 15 bp, synthetic construct
  source 1..15: mol_type = other DNA
tccctcagtagaccc

SEQ ID NO: 10310 - DNA, 15 bp, synthetic construct
  source 1..15: mol_type = other DNA
ccgctccttcttcca

SEQ ID NO: 10311 - DNA, 15 bp, synthetic construct
  source 1..15: mol_type = other DNA
cacccacttgagtcc

SEQ ID NO: 10312 - DNA, 15 bp, synthetic construct
  source 1..15: mol_type = other DNA
gcacgtctcttgctc

SEQ ID NO: 10313 - DNA, 15 bp, synthetic construct
  source 1..15: mol_type = other DNA
tcaggcggctgcgac

SEQ ID NO: 10314 - DNA, 15 bp, synthetic construct
  source 1..15: mol_type = other DNA
cccgcactgcggatc

SEQ ID NO: 10315 - DNA, 15 bp, synthetic construct
  source 1..15: mol_type = other DNA
ctctcattgaaacag

SEQ ID NO: 10316 - DNA, 15 bp, synthetic construct
  source 1..15: mol_type = other DNA
tatgttcaaatagca

SEQ ID NO: 10317 - DNA, 15 bp, synthetic construct
  source 1..15: mol_type = other DNA
gactaagaggtgttt

SEQ ID NO: 10318 - DNA, 15 bp, synthetic construct
  source 1..15: mol_type = other DNA
ctcttcagtctgata

SEQ ID NO: 10319 - DNA, 15 bp, synthetic construct
  source 1..15: mol_type = other DNA
tgaacgtcttgctcg

SEQ ID NO: 10320 - DNA, 15 bp, synthetic construct
  source 1..15: mol_type = other DNA
gtttgcagagattca

SEQ ID NO: 10321 - DNA, 15 bp, synthetic construct
  source 1..15: mol_type = other DNA
cttctagttctcatt

SEQ ID NO: 10322 - DNA, 15 bp, synthetic construct
  source 1..15: mol_type = other DNA
attgaaagcacactg

SEQ ID NO: 10323 - DNA, 15 bp, synthetic construct
  source 1..15: mol_type = other DNA
ggcttccaaatccca

SEQ ID NO: 10324 - DNA, 15 bp, synthetic construct
  source 1..15: mol_type = other DNA
aggatggtgcatact

SEQ ID NO: 10325 - DNA, 15 bp, synthetic construct
  source 1..15: mol_type = other DNA
gaattactgtgctga

SEQ ID NO: 10326 - DNA, 15 bp, synthetic construct
  source 1..15: mol_type = other DNA
cacttaatccccctt

SEQ ID NO: 10327 - DNA, 15 bp, synthetic construct
  source 1..15: mol_type = other DNA
catggtacactcagc

SEQ ID NO: 10328 - DNA, 15 bp, synthetic construct
  source 1..15: mol_type = other DNA
atattctctaagcaa

SEQ ID NO: 10329 - DNA, 15 bp, synthetic construct
  source 1..15: mol_type = other DNA
tgtagagaggcacat

SEQ ID NO: 10330 - DNA, 15 bp, synthetic construct
  source 1..15: mol_type = other DNA
aattatgaggtgctg

SEQ ID NO: 10331 - DNA, 15 bp, synthetic construct
  source 1..15: mol_type = other DNA
gatacactccccaaa

SEQ ID NO: 10332 - DNA, 15 bp, synthetic construct
  source 1..15: mol_type = other DNA
ataggactccagatg

SEQ ID NO: 10333 - DNA, 15 bp, synthetic construct
  source 1..15: mol_type = other DNA
ggcatctctataagg

SEQ ID NO: 10334 - DNA, 15 bp, synthetic construct
  source 1..15: mol_type = other DNA
aggaggtctttagaa

SEQ ID NO: 10335 - DNA, 15 bp, synthetic construct
  source 1..15: mol_type = other DNA
gcaccctctctaacc

SEQ ID NO: 10336 - DNA, 15 bp, synthetic construct
  source 1..15: mol_type = other DNA
aatgaagacgtgtat

SEQ ID NO: 10337 - DNA, 15 bp, synthetic construct
  source 1..15: mol_type = other DNA
tctccatagtctttg

SEQ ID NO: 10338 - DNA, 15 bp, synthetic construct
  source 1..15: mol_type = other DNA
aggaggaggcataca

SEQ ID NO: 10339 - DNA, 15 bp, synthetic construct
  source 1..15: mol_type = other DNA
cgggccgtgaagtat

SEQ ID NO: 10340 - DNA, 15 bp, synthetic construct
  source 1..15: mol_type = other DNA
ttccatggcggtacg

SEQ ID NO: 10341 - DNA, 15 bp, synthetic construct
  source 1..15: mol_type = other DNA
tcctggccatgacgc

SEQ ID NO: 10342 - DNA, 15 bp, synthetic construct
  source 1..15: mol_type = other DNA
ccacgaacaccatca

SEQ ID NO: 10343 - DNA, 15 bp, synthetic construct
  source 1..15: mol_type = other DNA
gtcgcacctatgtca

SEQ ID NO: 10344 - DNA, 15 bp, synthetic construct
  source 1..15: mol_type = other DNA
tagacgaccacaatc

SEQ ID NO: 10345 - DNA, 15 bp, synthetic construct
  source 1..15: mol_type = other DNA
gaggatgacgctagt

SEQ ID NO: 10346 - DNA, 15 bp, synthetic construct
  source 1..15: mol_type = other DNA
ggttgggttcaggat

SEQ ID NO: 10347 - DNA, 15 bp, synthetic construct
  source 1..15: mol_type = other DNA
caacctagatcctcc

SEQ ID NO: 10348 - DNA, 15 bp, synthetic construct
  source 1..15: mol_type = other DNA
tcacgatgaagtgtc

SEQ ID NO: 10349 - DNA, 15 bp, synthetic construct
  source 1..15: mol_type = other DNA
atctatgcatctttc

SEQ ID NO: 10350 - DNA, 15 bp, synthetic construct
  source 1..15: mol_type = other DNA
gcctctagaggcaag

SEQ ID NO: 10351 - DNA, 15 bp, synthetic construct
  source 1..15: mol_type = other DNA
agctgaggaatgtag

SEQ ID NO: 10352 - DNA, 15 bp, synthetic construct
  source 1..15: mol_type = other DNA
gctgatgaagagagt

SEQ ID NO: 10353 - DNA, 15 bp, synthetic construct
  source 1..15: mol_type = other DNA
taggtgccctcatac

SEQ ID NO: 10354 - DNA, 15 bp, synthetic construct
  source 1..15: mol_type = other DNA
gcctggcgtattttc

SEQ ID NO: 10355 - DNA, 15 bp, synthetic construct
  source 1..15: mol_type = other DNA
taggtgccctcatac

SEQ ID NO: 10356 - DNA, 15 bp, synthetic construct
  source 1..15: mol_type = other DNA
gcctggcgtattttc

SEQ ID NO: 10357 - DNA, 15 bp, synthetic construct
  source 1..15: mol_type = other DNA
cagctcaatctggtg

SEQ ID NO: 10358 - DNA, 15 bp, synthetic construct
  source 1..15: mol_type = other DNA
tctctccctcacaga

SEQ ID NO: 10359 - DNA, 15 bp, synthetic construct
  source 1..15: mol_type = other DNA
cagctcaatctggtg

SEQ ID NO: 10360 - DNA, 15 bp, synthetic construct
  source 1..15: mol_type = other DNA
tctctccctcacaga

SEQ ID NO: 10361 - DNA, 15 bp, synthetic construct
  source 1..15: mol_type = other DNA
gcagaagacgtccag

SEQ ID NO: 10362 - DNA, 15 bp, synthetic construct
  source 1..15: mol_type = other DNA
aacgaggccgtgtac

SEQ ID NO: 10363 - DNA, 15 bp, synthetic construct
  source 1..15: mol_type = other DNA
gcagaagacgtccag

SEQ ID NO: 10364 - DNA, 15 bp, synthetic construct
  source 1..15: mol_type = other DNA
aacgaggccgtgtac

SEQ ID NO: 10365 - DNA, 15 bp, synthetic construct
  source 1..15: mol_type = other DNA
aacatgcccggcttc

SEQ ID NO: 10366 - DNA, 15 bp, synthetic construct
  source 1..15: mol_type = other DNA
actgagacactcacg

SEQ ID NO: 10367 - DNA, 15 bp, synthetic construct
  source 1..15: mol_type = other DNA
agggcacccctacgt

SEQ ID NO: 10368 - DNA, 15 bp, synthetic construct
  source 1..15: mol_type = other DNA
agggtacctggacga

SEQ ID NO: 10369 - DNA, 15 bp, synthetic construct
  source 1..15: mol_type = other DNA
tcattctccacatag

SEQ ID NO: 10370 - DNA, 15 bp, synthetic construct
  source 1..15: mol_type = other DNA
cttggctttctctca

SEQ ID NO: 10371 - DNA, 15 bp, synthetic construct
  source 1..15: mol_type = other DNA
gagatgcatttcaac

SEQ ID NO: 10372 - DNA, 15 bp, synthetic construct
  source 1..15: mol_type = other DNA
catcagaatagactc

SEQ ID NO: 10373 - DNA, 15 bp, synthetic construct
  source 1..15: mol_type = other DNA
cacatagtgactgtc

SEQ ID NO: 10374 - DNA, 15 bp, synthetic construct
  source 1..15: mol_type = other DNA
ccaactcagatgacg

SEQ ID NO: 10375 - DNA, 15 bp, synthetic construct
  source 1..15: mol_type = other DNA
accttctcatcacgg

SEQ ID NO: 10376 - DNA, 15 bp, synthetic construct
  source 1..15: mol_type = other DNA
ccatgtccttccttg

SEQ ID NO: 10377 - DNA, 15 bp, synthetic construct
  source 1..15: mol_type = other DNA
acttaggttttgaac

SEQ ID NO: 10378 - DNA, 15 bp, synthetic construct
  source 1..15: mol_type = other DNA
ccaacaggatcttcg

SEQ ID NO: 10379 - DNA, 15 bp, synthetic construct
  source 1..15: mol_type = other DNA
tctcaccggatgatc

SEQ ID NO: 10380 - DNA, 15 bp, synthetic construct
  source 1..15: mol_type = other DNA
cagaactcagacaag

SEQ ID NO: 10381 - DNA, 15 bp, synthetic construct
  source 1..15: mol_type = other DNA
tctggaggaattcgt

SEQ ID NO: 10382 - DNA, 15 bp, synthetic construct
  source 1..15: mol_type = other DNA
atctaccgcatcgac

SEQ ID NO: 10383 - DNA, 15 bp, synthetic construct
  source 1..15: mol_type = other DNA
aggttctgcaccatc

SEQ ID NO: 10384 - DNA, 15 bp, synthetic construct
  source 1..15: mol_type = other DNA
cactccccgaagagg

SEQ ID NO: 10385 - DNA, 15 bp, synthetic construct
  source 1..15: mol_type = other DNA
gacacgctcatagag

SEQ ID NO: 10386 - DNA, 15 bp, synthetic construct
  source 1..15: mol_type = other DNA
ttctttgcccgcaac

SEQ ID NO: 10387 - DNA, 15 bp, synthetic construct
  source 1..15: mol_type = other DNA
aggctgcatcatcgt

SEQ ID NO: 10388 - DNA, 15 bp, synthetic construct
  source 1..15: mol_type = other DNA
tgcagagctgctaag

SEQ ID NO: 10389 - DNA, 15 bp, synthetic construct
  source 1..15: mol_type = other DNA
ggaagtacgagagca

SEQ ID NO: 10390 - DNA, 15 bp, synthetic construct
  source 1..15: mol_type = other DNA
gcccgaaaacacctt

SEQ ID NO: 10391 - DNA, 15 bp, synthetic construct
  source 1..15: mol_type = other DNA
ctgtttgcggatgtc

SEQ ID NO: 10392 - DNA, 15 bp, synthetic construct
  source 1..15: mol_type = other DNA
accacacacctgttc

SEQ ID NO: 10393 - DNA, 15 bp, synthetic construct
  source 1..15: mol_type = other DNA
ctgtttgcggatgtc

SEQ ID NO: 10394 - DNA, 15 bp, synthetic construct
  source 1..15: mol_type = other DNA
accacacacctgttc

SEQ ID NO: 10395 - DNA, 15 bp, synthetic construct
  source 1..15: mol_type = other DNA
agttggaaaagctga

SEQ ID NO: 10396 - DNA, 15 bp, synthetic construct
  source 1..15: mol_type = other DNA
ctgccttgttaacga

SEQ ID NO: 10397 - DNA, 15 bp, synthetic construct
  source 1..15: mol_type = other DNA
taagaccctctcgat

SEQ ID NO: 10398 - DNA, 15 bp, synthetic construct
  source 1..15: mol_type = other DNA
cacgcctcgcctgag

SEQ ID NO: 10399 - DNA, 15 bp, synthetic construct
  source 1..15: mol_type = other DNA
gcaaatcattcaacg

SEQ ID NO: 10400 - DNA, 15 bp, synthetic construct
  source 1..15: mol_type = other DNA
ctccggcagcgggta

SEQ ID NO: 10401 - DNA, 15 bp, synthetic construct
  source 1..15: mol_type = other DNA
tcagccactcctaca

SEQ ID NO: 10402 - DNA, 15 bp, synthetic construct
  source 1..15: mol_type = other DNA
tttcgcttgacctct

SEQ ID NO: 10403 - DNA, 15 bp, synthetic construct
  source 1..15: mol_type = other DNA
gccgatgcgaggtag

SEQ ID NO: 10404 - DNA, 15 bp, synthetic construct
  source 1..15: mol_type = other DNA
ccgtggtggatggac

SEQ ID NO: 10405 - DNA, 15 bp, synthetic construct
  source 1..15: mol_type = other DNA
atctcagccccttct

SEQ ID NO: 10406 - DNA, 15 bp, synthetic construct
  source 1..15: mol_type = other DNA
agtgggacgactcca

SEQ ID NO: 10407 - DNA, 15 bp, synthetic construct
  source 1..15: mol_type = other DNA
ccgacagcatgaagc

SEQ ID NO: 10408 - DNA, 15 bp, synthetic construct
  source 1..15: mol_type = other DNA
ggattgaggaaaagg

SEQ ID NO: 10409 - DNA, 15 bp, synthetic construct
  source 1..15: mol_type = other DNA
ttatctgtgcttttg

SEQ ID NO: 10410 - DNA, 15 bp, synthetic construct
  source 1..15: mol_type = other DNA
cctgcagaaagctgt

SEQ ID NO: 10411 - DNA, 15 bp, synthetic construct
  source 1..15: mol_type = other DNA
catagtgatgacaac

SEQ ID NO: 10412 - DNA, 15 bp, synthetic construct
  source 1..15: mol_type = other DNA
atcccagtccactta

SEQ ID NO: 10413 - DNA, 15 bp, synthetic construct
  source 1..15: mol_type = other DNA
ctactacaagcttca

SEQ ID NO: 10414 - DNA, 15 bp, synthetic construct
  source 1..15: mol_type = other DNA
agtgtccaatgcata

SEQ ID NO: 10415 - DNA, 15 bp, synthetic construct
  source 1..15: mol_type = other DNA
acccttcttggtgtg

SEQ ID NO: 10416 - DNA, 15 bp, synthetic construct
  source 1..15: mol_type = other DNA
gctgaagggcgagat

SEQ ID NO: 10417 - DNA, 15 bp, synthetic construct
  source 1..15: mol_type = other DNA
cagctcgtttaaccc

SEQ ID NO: 10418 - DNA, 15 bp, synthetic construct
  source 1..15: mol_type = other DNA
tgctcctgcaaaaat

SEQ ID NO: 10419 - DNA, 15 bp, synthetic construct
  source 1..15: mol_type = other DNA
atcagaaagctttga

SEQ ID NO: 10420 - DNA, 15 bp, synthetic construct
  source 1..15: mol_type = other DNA
aatgacgtgatttta

SEQ ID NO: 10421 - DNA, 15 bp, synthetic construct
  source 1..15: mol_type = other DNA
attccctcaacagcc

SEQ ID NO: 10422 - DNA, 15 bp, synthetic construct
  source 1..15: mol_type = other DNA
gtactggtaattact

SEQ ID NO: 10423 - DNA, 15 bp, synthetic construct
  source 1..15: mol_type = other DNA
agcctagcacaagct

SEQ ID NO: 10424 - DNA, 15 bp, synthetic construct
  source 1..15: mol_type = other DNA
taggtggctgccagt

SEQ ID NO: 10425 - DNA, 15 bp, synthetic construct
  source 1..15: mol_type = other DNA
tcccactgagctttt

SEQ ID NO: 10426 - DNA, 15 bp, synthetic construct
  source 1..15: mol_type = other DNA
ttaaagactctgacg

SEQ ID NO: 10427 - DNA, 15 bp, synthetic construct
  source 1..15: mol_type = other DNA
ggttctatccaagcc

SEQ ID NO: 10428 - DNA, 15 bp, synthetic construct
  source 1..15: mol_type = other DNA
aaatgtagcaactgt

SEQ ID NO: 10429 - DNA, 15 bp, synthetic construct
  source 1..15: mol_type = other DNA
cactgattagaccag

SEQ ID NO: 10430 - DNA, 15 bp, synthetic construct
  source 1..15: mol_type = other DNA
ttatctctctgcctt

SEQ ID NO: 10431 - DNA, 15 bp, synthetic construct
  source 1..15: mol_type = other DNA
ttaagaataaacccc

SEQ ID NO: 10432 - DNA, 15 bp, synthetic construct
  source 1..15: mol_type = other DNA
tttcttctgcttctg

SEQ ID NO: 10433 - DNA, 15 bp, synthetic construct
  source 1..15: mol_type = other DNA
aaaattccacatcat

SEQ ID NO: 10434 - DNA, 15 bp, synthetic construct
  source 1..15: mol_type = other DNA
gatatgtagaatgtt

SEQ ID NO: 10435 - DNA, 15 bp, synthetic construct
  source 1..15: mol_type = other DNA
gaaatgggctgtgaa

SEQ ID NO: 10436 - DNA, 15 bp, synthetic construct
  source 1..15: mol_type = other DNA
aagctactcttgtgt

SEQ ID NO: 10437 - DNA, 15 bp, synthetic construct
  source 1..15: mol_type = other DNA
gttgctgctaggtgc

SEQ ID NO: 10438 - DNA, 15 bp, synthetic construct
  source 1..15: mol_type = other DNA
aggatgtcatttatc

SEQ ID NO: 10439 - DNA, 15 bp, synthetic construct
  source 1..15: mol_type = other DNA
taacatttacttgac

SEQ ID NO: 10440 - DNA, 15 bp, synthetic construct
  source 1..15: mol_type = other DNA
gtagagtacctaatc

SEQ ID NO: 10441 - DNA, 15 bp, synthetic construct
  source 1..15: mol_type = other DNA
catagtttttggtag

SEQ ID NO: 10442 - DNA, 15 bp, synthetic construct
  source 1..15: mol_type = other DNA
ccattcagaattttc

SEQ ID NO: 10443 - DNA, 15 bp, synthetic construct
  source 1..15: mol_type = other DNA
atgagaacaacaccc

SEQ ID NO: 10444 - DNA, 15 bp, synthetic construct
  source 1..15: mol_type = other DNA
cttgcagctatttca

SEQ ID NO: 10445 - DNA, 15 bp, synthetic construct
  source 1..15: mol_type = other DNA
gatatgaaggagaga

SEQ ID NO: 10446 - DNA, 15 bp, synthetic construct
  source 1..15: mol_type = other DNA
agagcactgtgttca

SEQ ID NO: 10447 - DNA, 15 bp, synthetic construct
  source 1..15: mol_type = other DNA
ttggtattcctcaag

SEQ ID NO: 10448 - DNA, 15 bp, synthetic construct
  source 1..15: mol_type = other DNA
attaggtaaaggaag

SEQ ID NO: 10449 - DNA, 15 bp, synthetic construct
  source 1..15: mol_type = other DNA
catcatatcataggt

SEQ ID NO: 10450 - DNA, 15 bp, synthetic construct
  source 1..15: mol_type = other DNA
acttgccaggttcca

SEQ ID NO: 10451 - DNA, 15 bp, synthetic construct
  source 1..15: mol_type = other DNA
agcaccggactaact

SEQ ID NO: 10452 - DNA, 15 bp, synthetic construct
  source 1..15: mol_type = other DNA
ggagtattctgtcta

SEQ ID NO: 10453 - DNA, 15 bp, synthetic construct
  source 1..15: mol_type = other DNA
aatcgttggaatgct

SEQ ID NO: 10454 - DNA, 15 bp, synthetic construct
  source 1..15: mol_type = other DNA
ttttgtggctctcgt

SEQ ID NO: 10455 - DNA, 15 bp, synthetic construct
  source 1..15: mol_type = other DNA
cctcatctgtagaag

SEQ ID NO: 10456 - DNA, 15 bp, synthetic construct
  source 1..15: mol_type = other DNA
caaagtgctcattta

SEQ ID NO: 10457 - DNA, 15 bp, synthetic construct
  source 1..15: mol_type = other DNA
taatcattcttgtct

SEQ ID NO: 10458 - DNA, 15 bp, synthetic construct
  source 1..15: mol_type = other DNA
aatgaacaaatgaag

SEQ ID NO: 10459 - DNA, 15 bp, synthetic construct
  source 1..15: mol_type = other DNA
gacgacacataaatg

SEQ ID NO: 10460 - DNA, 15 bp, synthetic construct
  source 1..15: mol_type = other DNA
ttacagactggatga

SEQ ID NO: 10461 - DNA, 15 bp, synthetic construct
  source 1..15: mol_type = other DNA
ctcccaaacgtctcg

SEQ ID NO: 10462 - DNA, 15 bp, synthetic construct
  source 1..15: mol_type = other DNA
aaaataccaatggaa

SEQ ID NO: 10463 - DNA, 15 bp, synthetic construct
  source 1..15: mol_type = other DNA
tgtgaaggaaaaaca

SEQ ID NO: 10464 - DNA, 15 bp, synthetic construct
  source 1..15: mol_type = other DNA
gaagaatctatgaat

SEQ ID NO: 10465 - DNA, 15 bp, synthetic construct
  source 1..15: mol_type = other DNA
taacccagagtgatt

SEQ ID NO: 10466 - DNA, 15 bp, synthetic construct
  source 1..15: mol_type = other DNA
ttccgtgggctttca

SEQ ID NO: 10467 - DNA, 15 bp, synthetic construct
  source 1..15: mol_type = other DNA
tccatcaaggagcac

SEQ ID NO: 10468 - DNA, 15 bp, synthetic construct
  source 1..15: mol_type = other DNA
tgatagccactcatt

SEQ ID NO: 10469 - DNA, 15 bp, synthetic construct
  source 1..15: mol_type = other DNA
taggcactctgggac

SEQ ID NO: 10470 - DNA, 15 bp, synthetic construct
  source 1..15: mol_type = other DNA
cacctttttctagat

SEQ ID NO: 10471 - DNA, 15 bp, synthetic construct
  source 1..15: mol_type = other DNA
tcggataagtcaggg

SEQ ID NO: 10472 - DNA, 15 bp, synthetic construct
  source 1..15: mol_type = other DNA
ctttcattcagttaa

SEQ ID NO: 10473 - DNA, 15 bp, synthetic construct
  source 1..15: mol_type = other DNA
acttctgggtccatc

SEQ ID NO: 10474 - DNA, 15 bp, synthetic construct
  source 1..15: mol_type = other DNA
atctcttttaaaaat

SEQ ID NO: 10475 - DNA, 15 bp, synthetic construct
  source 1..15: mol_type = other DNA
gtatgttcctcaaga

SEQ ID NO: 10476 - DNA, 15 bp, synthetic construct
  source 1..15: mol_type = other DNA
tgatcgttctaggca

SEQ ID NO: 10477 - DNA, 15 bp, synthetic construct
  source 1..15: mol_type = other DNA
tggccttccggatca

SEQ ID NO: 10478 - DNA, 15 bp, synthetic construct
  source 1..15: mol_type = other DNA
ggatgttattcctgt

SEQ ID NO: 10479 - DNA, 15 bp, synthetic construct
  source 1..15: mol_type = other DNA
cccccgaagcttttt

SEQ ID NO: 10480 - DNA, 15 bp, synthetic construct
  source 1..15: mol_type = other DNA
tttcctaggcctgtg

SEQ ID NO: 10481 - DNA, 15 bp, synthetic construct
  source 1..15: mol_type = other DNA
agaactcggcatagg

SEQ ID NO: 10482 - DNA, 15 bp, synthetic construct
  source 1..15: mol_type = other DNA
ctgatgaccaaggca

SEQ ID NO: 10483 - DNA, 15 bp, synthetic construct
  source 1..15: mol_type = other DNA
ctttaggaaagagct

SEQ ID NO: 10484 - DNA, 15 bp, synthetic construct
  source 1..15: mol_type = other DNA
ttggctgccacattt

SEQ ID NO: 10485 - DNA, 15 bp, synthetic construct
  source 1..15: mol_type = other DNA
agaaggacaaatctc

SEQ ID NO: 10486 - DNA, 15 bp, synthetic construct
  source 1..15: mol_type = other DNA
gactttctccaactc

SEQ ID NO: 10487 - DNA, 15 bp, synthetic construct
  source 1..15: mol_type = other DNA
aaggcacatctagca

SEQ ID NO: 10488 - DNA, 15 bp, synthetic construct
  source 1..15: mol_type = other DNA
aagctcacagtgtac

SEQ ID NO: 10489 - DNA, 15 bp, synthetic construct
  source 1..15: mol_type = other DNA
ggtcgggcgacttac

SEQ ID NO: 10490 - DNA, 15 bp, synthetic construct
  source 1..15: mol_type = other DNA
tcgcgctcctgggta

SEQ ID NO: 10491 - DNA, 15 bp, synthetic construct
  source 1..15: mol_type = other DNA
aacacgagttgttac

SEQ ID NO: 10492 - DNA, 15 bp, synthetic construct
  source 1..15: mol_type = other DNA
tatgcaggttcacca

SEQ ID NO: 10493 - DNA, 15 bp, synthetic construct
  source 1..15: mol_type = other DNA
ttattgtctaaaaat

SEQ ID NO: 10494 - DNA, 15 bp, synthetic construct
  source 1..15: mol_type = other DNA
ccaaacaacacgtac

SEQ ID NO: 10495 - DNA, 15 bp, synthetic construct
  source 1..15: mol_type = other DNA
tgctgatgaagtaga

SEQ ID NO: 10496 - DNA, 15 bp, synthetic construct
  source 1..15: mol_type = other DNA
caccttaagaaaata

SEQ ID NO: 10497 - DNA, 15 bp, synthetic construct
  source 1..15: mol_type = other DNA
tctcacagtgctttc

SEQ ID NO: 10498 - DNA, 15 bp, synthetic construct
  source 1..15: mol_type = other DNA
gcaagtactgtggaa

SEQ ID NO: 10499 - DNA, 15 bp, synthetic construct
  source 1..15: mol_type = other DNA
cagagggtgatgaag

SEQ ID NO: 10500 - DNA, 15 bp, synthetic construct
  source 1..15: mol_type = other DNA
tcaaattgtctccat

SEQ ID NO: 10501 - DNA, 15 bp, synthetic construct
  source 1..15: mol_type = other DNA
aagtgatccaccatc

SEQ ID NO: 10502 - DNA, 15 bp, synthetic construct
  source 1..15: mol_type = other DNA
agataactacgacaa

SEQ ID NO: 10503 - DNA, 15 bp, synthetic construct
  source 1..15: mol_type = other DNA
caactgagttctcga

SEQ ID NO: 10504 - DNA, 15 bp, synthetic construct
  source 1..15: mol_type = other DNA
gttgaaagagcacta

SEQ ID NO: 10505 - DNA, 15 bp, synthetic construct
  source 1..15: mol_type = other DNA
ttgggctgggttcta

SEQ ID NO: 10506 - DNA, 15 bp, synthetic construct
  source 1..15: mol_type = other DNA
caaatctggagttgt

SEQ ID NO: 10507 - DNA, 15 bp, synthetic construct
  source 1..15: mol_type = other DNA
gttcctggcctcacc

SEQ ID NO: 10508 - DNA, 15 bp, synthetic construct
  source 1..15: mol_type = other DNA
ctgttatggcctgtt

SEQ ID NO: 10509 - DNA, 15 bp, synthetic construct
  source 1..15: mol_type = other DNA
agtgttttgcaaata

SEQ ID NO: 10510 - DNA, 15 bp, synthetic construct
  source 1..15: mol_type = other DNA
cttgggtcattgatt

SEQ ID NO: 10511 - DNA, 15 bp, synthetic construct
  source 1..15: mol_type = other DNA
cttgggtcattgatt

SEQ ID NO: 10512 - DNA, 15 bp, synthetic construct
  source 1..15: mol_type = other DNA
gaattgcaaagattg

SEQ ID NO: 10513 - DNA, 15 bp, synthetic construct
  source 1..15: mol_type = other DNA
cttttcagtgcataa

SEQ ID NO: 10514 - DNA, 15 bp, synthetic construct
  source 1..15: mol_type = other DNA
aaaatgcgaacttgg

SEQ ID NO: 10515 - DNA, 15 bp, synthetic construct
  source 1..15: mol_type = other DNA
aaggagcaggtactg

SEQ ID NO: 10516 - DNA, 15 bp, synthetic construct
  source 1..15: mol_type = other DNA
gtgacctattgcaac

SEQ ID NO: 10517 - DNA, 15 bp, synthetic construct
  source 1..15: mol_type = other DNA
cgatataaactggaa

SEQ ID NO: 10518 - DNA, 15 bp, synthetic construct
  source 1..15: mol_type = other DNA
ggctcgaataatacc

SEQ ID NO: 10519 - DNA, 15 bp, synthetic construct
  source 1..15: mol_type = other DNA
caaatgtattgaagg

SEQ ID NO: 10520 - DNA, 15 bp, synthetic construct
  source 1..15: mol_type = other DNA
aaatggaaactatgt

SEQ ID NO: 10521 - DNA, 15 bp, synthetic construct
  source 1..15: mol_type = other DNA
atcataatcaggtgg

SEQ ID NO: 10522 - DNA, 15 bp, synthetic construct
  source 1..15: mol_type = other DNA
tggtgccaataccag

SEQ ID NO: 10523 - DNA, 15 bp, synthetic construct
  source 1..15: mol_type = other DNA
attgctgctcttcac

SEQ ID NO: 10524 - DNA, 15 bp, synthetic construct
  source 1..15: mol_type = other DNA
tgaatgctctactgg

SEQ ID NO: 10525 - DNA, 15 bp, synthetic construct
  source 1..15: mol_type = other DNA
cgaatggctcttcta

SEQ ID NO: 10526 - DNA, 15 bp, synthetic construct
  source 1..15: mol_type = other DNA
ttccatgctgggact

SEQ ID NO: 10527 - DNA, 15 bp, synthetic construct
  source 1..15: mol_type = other DNA
ctgtcattatggcta

SEQ ID NO: 10528 - DNA, 15 bp, synthetic construct
  source 1..15: mol_type = other DNA
tcataatgcggttgt

SEQ ID NO: 10529 - DNA, 15 bp, synthetic construct
  source 1..15: mol_type = other DNA
tgttaattaactgga

SEQ ID NO: 10530 - DNA, 15 bp, synthetic construct
  source 1..15: mol_type = other DNA
ggcccttcaggttac

SEQ ID NO: 10531 - DNA, 15 bp, synthetic construct
  source 1..15: mol_type = other DNA
ggaaggacacaaaag

SEQ ID NO: 10532 - DNA, 15 bp, synthetic construct
  source 1..15: mol_type = other DNA
ctcagggaactatgt

SEQ ID NO: 10533 - DNA, 15 bp, synthetic construct
  source 1..15: mol_type = other DNA
gggtttggttcttag

SEQ ID NO: 10534 - DNA, 15 bp, synthetic construct
  source 1..15: mol_type = other DNA
gaaacctaagtgcat

SEQ ID NO: 10535 - DNA, 15 bp, synthetic construct
  source 1..15: mol_type = other DNA
acttggctccaatta

SEQ ID NO: 10536 - DNA, 15 bp, synthetic construct
  source 1..15: mol_type = other DNA
attgatggcttttta

SEQ ID NO: 10537 - DNA, 15 bp, synthetic construct
  source 1..15: mol_type = other DNA
tgtgcaaatatttag

SEQ ID NO: 10538 - DNA, 15 bp, synthetic construct
  source 1..15: mol_type = other DNA
tcataggacaatact

SEQ ID NO: 10539 - DNA, 15 bp, synthetic construct
  source 1..15: mol_type = other DNA
gtgtgttccacgtag

SEQ ID NO: 10540 - DNA, 15 bp, synthetic construct
  source 1..15: mol_type = other DNA
agctcactgacaacc

SEQ ID NO: 10541 - DNA, 15 bp, synthetic construct
  source 1..15: mol_type = other DNA
ctctaatcacttgct

SEQ ID NO: 10542 - DNA, 15 bp, synthetic construct
  source 1..15: mol_type = other DNA
gagggttaccaatct

SEQ ID NO: 10543 - DNA, 15 bp, synthetic construct
  source 1..15: mol_type = other DNA
tcagccacaaccaat

SEQ ID NO: 10544 - DNA, 15 bp, synthetic construct
  source 1..15: mol_type = other DNA
gtatggattcacttt

SEQ ID NO: 10545 - DNA, 15 bp, synthetic construct
  source 1..15: mol_type = other DNA
tccaatgtgttctac

SEQ ID NO: 10546 - DNA, 15 bp, synthetic construct
  source 1..15: mol_type = other DNA
tgctactaaatcaga

SEQ ID NO: 10547 - DNA, 15 bp, synthetic construct
  source 1..15: mol_type = other DNA
aacaacaacaacagc

SEQ ID NO: 10548 - DNA, 15 bp, synthetic construct
  source 1..15: mol_type = other DNA
gtcaggaattactca

SEQ ID NO: 10549 - DNA, 15 bp, synthetic construct
  source 1..15: mol_type = other DNA
aactcacccactcga

SEQ ID NO: 10550 - DNA, 15 bp, synthetic construct
  source 1..15: mol_type = other DNA
actactactttctct

SEQ ID NO: 10551 - DNA, 15 bp, synthetic construct
  source 1..15: mol_type = other DNA
tgtcaaagatttcaa

SEQ ID NO: 10552 - DNA, 15 bp, synthetic construct
  source 1..15: mol_type = other DNA
tgtgaatgtaagcaa

SEQ ID NO: 10553 - DNA, 15 bp, synthetic construct
  source 1..15: mol_type = other DNA
catcctacattacct

SEQ ID NO: 10554 - DNA, 15 bp, synthetic construct
  source 1..15: mol_type = other DNA
gattgtgtgcctgaa

SEQ ID NO: 10555 - DNA, 15 bp, synthetic construct
  source 1..15: mol_type = other DNA
ggtcggtaaactctt

SEQ ID NO: 10556 - DNA, 15 bp, synthetic construct
  source 1..15: mol_type = other DNA
ctctattggaacatt

SEQ ID NO: 10557 - DNA, 15 bp, synthetic construct
  source 1..15: mol_type = other DNA
cattagggtgatccg

SEQ ID NO: 10558 - DNA, 15 bp, synthetic construct
  source 1..15: mol_type = other DNA
tcttgatggaaggaa

SEQ ID NO: 10559 - DNA, 15 bp, synthetic construct
  source 1..15: mol_type = other DNA
gtgcctagcatagtg

SEQ ID NO: 10560 - DNA, 15 bp, synthetic construct
  source 1..15: mol_type = other DNA
aatcacttggacatg

SEQ ID NO: 10561 - DNA, 15 bp, synthetic construct
  source 1..15: mol_type = other DNA
cttttgcctttcttg

SEQ ID NO: 10562 - DNA, 15 bp, synthetic construct
  source 1..15: mol_type = other DNA
tccaacacttccata

SEQ ID NO: 10563 - DNA, 15 bp, synthetic construct
  source 1..15: mol_type = other DNA
tgagatagtgtccag

SEQ ID NO: 10564 - DNA, 15 bp, synthetic construct
  source 1..15: mol_type = other DNA
cctaaaagttttcaa

SEQ ID NO: 10565 - DNA, 15 bp, synthetic construct
  source 1..15: mol_type = other DNA
cacgaatttacctat

SEQ ID NO: 10566 - DNA, 15 bp, synthetic construct
  source 1..15: mol_type = other DNA
ctgtacttccaacta

SEQ ID NO: 10567 - DNA, 15 bp, synthetic construct
  source 1..15: mol_type = other DNA
gtattggtgcatccg

SEQ ID NO: 10568 - DNA, 15 bp, synthetic construct
  source 1..15: mol_type = other DNA
ttaaagtgacatggc

SEQ ID NO: 10569 - DNA, 15 bp, synthetic construct
  source 1..15: mol_type = other DNA
gaaagaaatggactg

SEQ ID NO: 10570 - DNA, 15 bp, synthetic construct
  source 1..15: mol_type = other DNA
ctacatccatgatgc

SEQ ID NO: 10571 - DNA, 15 bp, synthetic construct
  source 1..15: mol_type = other DNA
atatcgaatcgatct

SEQ ID NO: 10572 - DNA, 15 bp, synthetic construct
  source 1..15: mol_type = other DNA
ttgtggccattgact

SEQ ID NO: 10573 - DNA, 15 bp, synthetic construct
  source 1..15: mol_type = other DNA
attgcaggaaaagca

SEQ ID NO: 10574 - DNA, 15 bp, synthetic construct
  source 1..15: mol_type = other DNA
gtcctgatatctgtt

SEQ ID NO: 10575 - DNA, 15 bp, synthetic construct
  source 1..15: mol_type = other DNA
gttgatgaagcatga

SEQ ID NO: 10576 - DNA, 15 bp, synthetic construct
  source 1..15: mol_type = other DNA
ctgctaccctttcta

SEQ ID NO: 10577 - DNA, 15 bp, synthetic construct
  source 1..15: mol_type = other DNA
aaagggtagcagcaa

SEQ ID NO: 10578 - DNA, 15 bp, synthetic construct
  source 1..15: mol_type = other DNA
ttaaataaccgacct

SEQ ID NO: 10579 - DNA, 15 bp, synthetic construct
  source 1..15: mol_type = other DNA
aaaaacattatatta

SEQ ID NO: 10580 - DNA, 15 bp, synthetic construct
  source 1..15: mol_type = other DNA
ccctttctttcaacg

SEQ ID NO: 10581 - DNA, 15 bp, synthetic construct
  source 1..15: mol_type = other DNA
cggatgaacatgtac

SEQ ID NO: 10582 - DNA, 15 bp, synthetic construct
  source 1..15: mol_type = other DNA
cccattatctcctac

SEQ ID NO: 10583 - DNA, 15 bp, synthetic construct
  source 1..15: mol_type = other DNA
ctcagcattctttat

SEQ ID NO: 10584 - DNA, 15 bp, synthetic construct
  source 1..15: mol_type = other DNA
tgttgctttctattc

SEQ ID NO: 10585 - DNA, 15 bp, synthetic construct
  source 1..15: mol_type = other DNA
gataggatcctttga

SEQ ID NO: 10586 - DNA, 15 bp, synthetic construct
  source 1..15: mol_type = other DNA
gggcctagcattcac

SEQ ID NO: 10587 - DNA, 15 bp, synthetic construct
  source 1..15: mol_type = other DNA
gtctgggtaccacag

SEQ ID NO: 10588 - DNA, 15 bp, synthetic construct
  source 1..15: mol_type = other DNA
atgtgttttaagcta

SEQ ID NO: 10589 - DNA, 15 bp, synthetic construct
  source 1..15: mol_type = other DNA
tgaatagacgttacc

SEQ ID NO: 10590 - DNA, 15 bp, synthetic construct
  source 1..15: mol_type = other DNA
tgtgggaactcatgg

SEQ ID NO: 10591 - DNA, 15 bp, synthetic construct
  source 1..15: mol_type = other DNA
tctaccatggacaac

SEQ ID NO: 10592 - DNA, 15 bp, synthetic construct
  source 1..15: mol_type = other DNA
aagaaatcacagtca

SEQ ID NO: 10593 - DNA, 15 bp, synthetic construct
  source 1..15: mol_type = other DNA
aattcagtttttcta

SEQ ID NO: 10594 - DNA, 15 bp, synthetic construct
  source 1..15: mol_type = other DNA
cttccatcgttggac

SEQ ID NO: 10595 - DNA, 15 bp, synthetic construct
  source 1..15: mol_type = other DNA
atgtggcctggaagc

SEQ ID NO: 10596 - DNA, 15 bp, synthetic construct
  source 1..15: mol_type = other DNA
aatcccaaagtctat

SEQ ID NO: 10597 - DNA, 15 bp, synthetic construct
  source 1..15: mol_type = other DNA
ttagcactgaaacaa

SEQ ID NO: 10598 - DNA, 15 bp, synthetic construct
  source 1..15: mol_type = other DNA
ctagcgttctttctc

SEQ ID NO: 10599 - DNA, 15 bp, synthetic construct
  source 1..15: mol_type = other DNA
ccttttaaccgctag

SEQ ID NO: 10600 - DNA, 15 bp, synthetic construct
  source 1..15: mol_type = other DNA
ttcgagtaaagatgt

SEQ ID NO: 10601 - DNA, 15 bp, synthetic construct
  source 1..15: mol_type = other DNA
gcaacctagaatggc

SEQ ID NO: 10602 - DNA, 15 bp, synthetic construct
  source 1..15: mol_type = other DNA
gttttatttgccagt

SEQ ID NO: 10603 - DNA, 15 bp, synthetic construct
  source 1..15: mol_type = other DNA
gttagcactgagata

SEQ ID NO: 10604 - DNA, 15 bp, synthetic construct
  source 1..15: mol_type = other DNA
atgaaaagcatatga

SEQ ID NO: 10605 - DNA, 15 bp, synthetic construct
  source 1..15: mol_type = other DNA
actgaagatttctct

SEQ ID NO: 10606 - DNA, 15 bp, synthetic construct
  source 1..15: mol_type = other DNA
ctagatgtgaatctg

SEQ ID NO: 10607 - DNA, 15 bp, synthetic construct
  source 1..15: mol_type = other DNA
gagacaatgcttgaa

SEQ ID NO: 10608 - DNA, 15 bp, synthetic construct
  source 1..15: mol_type = other DNA
agcatccatgattcc

SEQ ID NO: 10609 - DNA, 15 bp, synthetic construct
  source 1..15: mol_type = other DNA
taggaaacctccttt

SEQ ID NO: 10610 - DNA, 15 bp, synthetic construct
  source 1..15: mol_type = other DNA
tgtaattgcttaaaa

SEQ ID NO: 10611 - DNA, 15 bp, synthetic construct
  source 1..15: mol_type = other DNA
aaactttggaatgtg

SEQ ID NO: 10612 - DNA, 15 bp, synthetic construct
  source 1..15: mol_type = other DNA
aactgactgaacctt

SEQ ID NO: 10613 - DNA, 15 bp, synthetic construct
  source 1..15: mol_type = other DNA
agcaactgcaaatac

SEQ ID NO: 10614 - DNA, 15 bp, synthetic construct
  source 1..15: mol_type = other DNA
tggatttttccatcc

SEQ ID NO: 10615 - DNA, 15 bp, synthetic construct
  source 1..15: mol_type = other DNA
catctcccttgatct

SEQ ID NO: 10616 - DNA, 15 bp, synthetic construct
  source 1..15: mol_type = other DNA
ctttttccagcatgt

SEQ ID NO: 10617 - DNA, 15 bp, synthetic construct
  source 1..15: mol_type = other DNA
aatctgtggagcagt

SEQ ID NO: 10618 - DNA, 15 bp, synthetic construct
  source 1..15: mol_type = other DNA
gagcacttatgaagt

SEQ ID NO: 10619 - DNA, 15 bp, synthetic construct
  source 1..15: mol_type = other DNA
tgaacagcgagtata

SEQ ID NO: 10620 - DNA, 15 bp, synthetic construct
  source 1..15: mol_type = other DNA
tggcccaagtagcaa

SEQ ID NO: 10621 - DNA, 15 bp, synthetic construct
  source 1..15: mol_type = other DNA
cttgaagccacgtcc

SEQ ID NO: 10622 - DNA, 15 bp, synthetic construct
  source 1..15: mol_type = other DNA
ctggattatagtcct

SEQ ID NO: 10623 - DNA, 15 bp, synthetic construct
  source 1..15: mol_type = other DNA
cattgtgcgttgggt

SEQ ID NO: 10624 - DNA, 15 bp, synthetic construct
  source 1..15: mol_type = other DNA
ttctttctcctgtag

SEQ ID NO: 10625 - DNA, 15 bp, synthetic construct
  source 1..15: mol_type = other DNA
gtaatctaaagtgca

SEQ ID NO: 10626 - DNA, 15 bp, synthetic construct
  source 1..15: mol_type = other DNA
cagtttaatgcagac

SEQ ID NO: 10627 - DNA, 15 bp, synthetic construct
  source 1..15: mol_type = other DNA
gaaatggctgctgtt

SEQ ID NO: 10628 - DNA, 15 bp, synthetic construct
  source 1..15: mol_type = other DNA
aatcatctctcatag

SEQ ID NO: 10629 - DNA, 15 bp, synthetic construct
  source 1..15: mol_type = other DNA
aatccagaccttgtg

SEQ ID NO: 10630 - DNA, 15 bp, synthetic construct
  source 1..15: mol_type = other DNA
aaattacttcatcca

SEQ ID NO: 10631 - DNA, 15 bp, synthetic construct
  source 1..15: mol_type = other DNA
acaaactttatttct

SEQ ID NO: 10632 - DNA, 15 bp, synthetic construct
  source 1..15: mol_type = other DNA
gcatttatcggatca

SEQ ID NO: 10633 - DNA, 15 bp, synthetic construct
  source 1..15: mol_type = other DNA
gaagtttgtgaagtg

SEQ ID NO: 10634 - DNA, 15 bp, synthetic construct
  source 1..15: mol_type = other DNA
tattgaaaatcaagt

SEQ ID NO: 10635 - DNA, 15 bp, synthetic construct
  source 1..15: mol_type = other DNA
tagcactgttttgca

SEQ ID NO: 10636 - DNA, 15 bp, synthetic construct
  source 1..15: mol_type = other DNA
acacacatctgtcct

SEQ ID NO: 10637 - DNA, 15 bp, synthetic construct
  source 1..15: mol_type = other DNA
gaagcaggaaatcag

SEQ ID NO: 10638 - DNA, 15 bp, synthetic construct
  source 1..15: mol_type = other DNA
atcaacagggaccat

SEQ ID NO: 10639 - DNA, 15 bp, synthetic construct
  source 1..15: mol_type = other DNA
agtcggtgtcataaa

SEQ ID NO: 10640 - DNA, 15 bp, synthetic construct
  source 1..15: mol_type = other DNA
aaatccaggtagctt

SEQ ID NO: 10641 - DNA, 15 bp, synthetic construct
  source 1..15: mol_type = other DNA
atacaagcccaagag

SEQ ID NO: 10642 - DNA, 15 bp, synthetic construct
  source 1..15: mol_type = other DNA
gcagttccattttgg

SEQ ID NO: 10643 - DNA, 15 bp, synthetic construct
  source 1..15: mol_type = other DNA
tgtctgtaccgcaat

SEQ ID NO: 10644 - DNA, 15 bp, synthetic construct
  source 1..15: mol_type = other DNA
taaaggatatgagtg

SEQ ID NO: 10645 - DNA, 15 bp, synthetic construct
  source 1..15: mol_type = other DNA
tgaagacaacaaccc

SEQ ID NO: 10646 - DNA, 15 bp, synthetic construct
  source 1..15: mol_type = other DNA
tgtatcctggagaaa

SEQ ID NO: 10647 - DNA, 15 bp, synthetic construct
  source 1..15: mol_type = other DNA
acagtgggcagaact

SEQ ID NO: 10648 - DNA, 15 bp, synthetic construct
  source 1..15: mol_type = other DNA
atctcctcaggcagt

SEQ ID NO: 10649 - DNA, 15 bp, synthetic construct
  source 1..15: mol_type = other DNA
agataaccgaatata

SEQ ID NO: 10650 - DNA, 15 bp, synthetic construct
  source 1..15: mol_type = other DNA
aaagtctgtggcaac

SEQ ID NO: 10651 - DNA, 15 bp, synthetic construct
  source 1..15: mol_type = other DNA
acctgatccagacac

SEQ ID NO: 10652 - DNA, 15 bp, synthetic construct
  source 1..15: mol_type = other DNA
aaaatgacctactgc

SEQ ID NO: 10653 - DNA, 15 bp, synthetic construct
  source 1..15: mol_type = other DNA
cttagtcattagagc

SEQ ID NO: 10654 - DNA, 15 bp, synthetic construct
  source 1..15: mol_type = other DNA
gcgtctatatgatga

SEQ ID NO: 10655 - DNA, 15 bp, synthetic construct
  source 1..15: mol_type = other DNA
ctgagaactgtcact

SEQ ID NO: 10656 - DNA, 15 bp, synthetic construct
  source 1..15: mol_type = other DNA
tccaatgcctgcaag

SEQ ID NO: 10657 - DNA, 15 bp, synthetic construct
  source 1..15: mol_type = other DNA
agcatagcattggcc

SEQ ID NO: 10658 - DNA, 15 bp, synthetic construct
  source 1..15: mol_type = other DNA
gcttaatgattcatc

SEQ ID NO: 10659 - DNA, 15 bp, synthetic construct
  source 1..15: mol_type = other DNA
ccctgagtcctaatc

SEQ ID NO: 10660 - DNA, 15 bp, synthetic construct
  source 1..15: mol_type = other DNA
ttagagtgtggaggt

SEQ ID NO: 10661 - DNA, 15 bp, synthetic construct
  source 1..15: mol_type = other DNA
ccccggagacttaat

SEQ ID NO: 10662 - DNA, 15 bp, synthetic construct
  source 1..15: mol_type = other DNA
gattcatttgtttat

SEQ ID NO: 10663 - DNA, 15 bp, synthetic construct
  source 1..15: mol_type = other DNA
gtatccaaaagtcta

SEQ ID NO: 10664 - DNA, 15 bp, synthetic construct
  source 1..15: mol_type = other DNA
caggtttatgatgga

SEQ ID NO: 10665 - DNA, 15 bp, synthetic construct
  source 1..15: mol_type = other DNA
cattgtcactgctga

SEQ ID NO: 10666 - DNA, 15 bp, synthetic construct
  source 1..15: mol_type = other DNA
aagtgcctcagtatg

SEQ ID NO: 10667 - DNA, 15 bp, synthetic construct
  source 1..15: mol_type = other DNA
caagagttactacat

SEQ ID NO: 10668 - DNA, 15 bp, synthetic construct
  source 1..15: mol_type = other DNA
tctccaaccttcatt

SEQ ID NO: 10669 - DNA, 15 bp, synthetic construct
  source 1..15: mol_type = other DNA
ggaaagacttagttc

SEQ ID NO: 10670 - DNA, 15 bp, synthetic construct
  source 1..15: mol_type = other DNA
tgagtgtttgagcaa

SEQ ID NO: 10671 - DNA, 15 bp, synthetic construct
  source 1..15: mol_type = other DNA
actgaaagaatcaac

SEQ ID NO: 10672 - DNA, 15 bp, synthetic construct
  source 1..15: mol_type = other DNA
tacattcctattatt

SEQ ID NO: 10673 - DNA, 15 bp, synthetic construct
  source 1..15: mol_type = other DNA
aattctcaggtactc

SEQ ID NO: 10674 - DNA, 15 bp, synthetic construct
  source 1..15: mol_type = other DNA
tccttgtctagacag

SEQ ID NO: 10675 - DNA, 15 bp, synthetic construct
  source 1..15: mol_type = other DNA
caatacccaaagcca

SEQ ID NO: 10676 - DNA, 15 bp, synthetic construct
  source 1..15: mol_type = other DNA
atagaggatccctga

SEQ ID NO: 10677 - DNA, 15 bp, synthetic construct
  source 1..15: mol_type = other DNA
ggttgacattgaacc

SEQ ID NO: 10678 - DNA, 15 bp, synthetic construct
  source 1..15: mol_type = other DNA
aggtggagaaggttt

SEQ ID NO: 10679 - DNA, 15 bp, synthetic construct
  source 1..15: mol_type = other DNA
ggttctggcacctcg

SEQ ID NO: 10680 - DNA, 15 bp, synthetic construct
  source 1..15: mol_type = other DNA
tttattcacgctgtt

SEQ ID NO: 10681 - DNA, 15 bp, synthetic construct
  source 1..15: mol_type = other DNA
ggtagtgcttgtatg

SEQ ID NO: 10682 - DNA, 15 bp, synthetic construct
  source 1..15: mol_type = other DNA
tgtgctcttgtgtaa

SEQ ID NO: 10683 - DNA, 15 bp, synthetic construct
  source 1..15: mol_type = other DNA
gggatgttttaggcc

SEQ ID NO: 10684 - DNA, 15 bp, synthetic construct
  source 1..15: mol_type = other DNA
aaatccttaaacgta

SEQ ID NO: 10685 - DNA, 15 bp, synthetic construct
  source 1..15: mol_type = other DNA
gattccaaggaaacc

SEQ ID NO: 10686 - DNA, 15 bp, synthetic construct
  source 1..15: mol_type = other DNA
aacatgcgttttgtt

SEQ ID NO: 10687 - DNA, 15 bp, synthetic construct
  source 1..15: mol_type = other DNA
ttagactcagctctg

SEQ ID NO: 10688 - DNA, 15 bp, synthetic construct
  source 1..15: mol_type = other DNA
taactgaagcttttt

SEQ ID NO: 10689 - DNA, 15 bp, synthetic construct
  source 1..15: mol_type = other DNA
ggagaactcatcggt

SEQ ID NO: 10690 - DNA, 15 bp, synthetic construct
  source 1..15: mol_type = other DNA
agtgcttaaagtaga

SEQ ID NO: 10691 - DNA, 15 bp, synthetic construct
  source 1..15: mol_type = other DNA
tcaccgtatatggat

SEQ ID NO: 10692 - DNA, 15 bp, synthetic construct
  source 1..15: mol_type = other DNA
actgatgcattctct

SEQ ID NO: 10693 - DNA, 15 bp, synthetic construct
  source 1..15: mol_type = other DNA
ttgtttatctggcta

SEQ ID NO: 10694 - DNA, 15 bp, synthetic construct
  source 1..15: mol_type = other DNA
atgctcagttggttg

SEQ ID NO: 10695 - DNA, 15 bp, synthetic construct
  source 1..15: mol_type = other DNA
ccctagccgcagtcc

SEQ ID NO: 10696 - DNA, 15 bp, synthetic construct
  source 1..15: mol_type = other DNA
aaggcgcttctgaac

SEQ ID NO: 10697 - DNA, 15 bp, synthetic construct
  source 1..15: mol_type = other DNA
gccttattctcacca

SEQ ID NO: 10698 - DNA, 15 bp, synthetic construct
  source 1..15: mol_type = other DNA
cagttgttctcatgc

SEQ ID NO: 10699 - DNA, 15 bp, synthetic construct
  source 1..15: mol_type = other DNA
tctacggcacgtacc

SEQ ID NO: 10700 - DNA, 15 bp, synthetic construct
  source 1..15: mol_type = other DNA
cagcggctgtgataa

SEQ ID NO: 10701 - DNA, 15 bp, synthetic construct
  source 1..15: mol_type = other DNA
gatgagagctaggcc

SEQ ID NO: 10702 - DNA, 15 bp, synthetic construct
  source 1..15: mol_type = other DNA
agaccttgaggtaga

SEQ ID NO: 10703 - DNA, 15 bp, synthetic construct
  source 1..15: mol_type = other DNA
ttctctctgcagacc

SEQ ID NO: 10704 - DNA, 15 bp, synthetic construct
  source 1..15: mol_type = other DNA
gttctcccgaatgcg

SEQ ID NO: 10705 - DNA, 15 bp, synthetic construct
  source 1..15: mol_type = other DNA
caacacctcctttcc

SEQ ID NO: 10706 - DNA, 15 bp, synthetic construct
  source 1..15: mol_type = other DNA
tggcttgtgtcaagg

SEQ ID NO: 10707 - DNA, 15 bp, synthetic construct
  source 1..15: mol_type = other DNA
tgcaaactcgtgctc

SEQ ID NO: 10708 - DNA, 15 bp, synthetic construct
  source 1..15: mol_type = other DNA
ggccaccagctcgta

SEQ ID NO: 10709 - DNA, 15 bp, synthetic construct
  source 1..15: mol_type = other DNA
ggtctgcccttccgc

SEQ ID NO: 10710 - DNA, 15 bp, synthetic construct
  source 1..15: mol_type = other DNA
gggtagaccacagca

SEQ ID NO: 10711 - DNA, 15 bp, synthetic construct
  source 1..15: mol_type = other DNA
tggtccacctatggg

SEQ ID NO: 10712 - DNA, 15 bp, synthetic construct
  source 1..15: mol_type = other DNA
gaccgaggtctcgtt

SEQ ID NO: 10713 - DNA, 15 bp, synthetic construct
  source 1..15: mol_type = other DNA
atgcagacgtggtac

SEQ ID NO: 10714 - DNA, 15 bp, synthetic construct
  source 1..15: mol_type = other DNA
gagcacctcatttcc

SEQ ID NO: 10715 - DNA, 15 bp, synthetic construct
  source 1..15: mol_type = other DNA
tacacatgaggaagc

SEQ ID NO: 10716 - DNA, 15 bp, synthetic construct
  source 1..15: mol_type = other DNA
agggagtaggtactg

SEQ ID NO: 10717 - DNA, 15 bp, synthetic construct
  source 1..15: mol_type = other DNA
ttcaacgtgtcggtg

SEQ ID NO: 10718 - DNA, 15 bp, synthetic construct
  source 1..15: mol_type = other DNA
ggcctttcaatcttc

SEQ ID NO: 10719 - DNA, 15 bp, synthetic construct
  source 1..15: mol_type = other DNA
tgtgggaatctctac

SEQ ID NO: 10720 - DNA, 15 bp, synthetic construct
  source 1..15: mol_type = other DNA
agttcggcacacttg

SEQ ID NO: 10721 - DNA, 15 bp, synthetic construct
  source 1..15: mol_type = other DNA
ttgtgaatgacacca

SEQ ID NO: 10722 - DNA, 15 bp, synthetic construct
  source 1..15: mol_type = other DNA
tgtactgcttttctc

SEQ ID NO: 10723 - DNA, 15 bp, synthetic construct
  source 1..15: mol_type = other DNA
ggcactagctggacg

SEQ ID NO: 10724 - DNA, 15 bp, synthetic construct
  source 1..15: mol_type = other DNA
tccaccggtgccatc

SEQ ID NO: 10725 - DNA, 15 bp, synthetic construct
  source 1..15: mol_type = other DNA
ggtgtttccctactc

SEQ ID NO: 10726 - DNA, 15 bp, synthetic construct
  source 1..15: mol_type = other DNA
tgccctgattaaacc

SEQ ID NO: 10727 - DNA, 15 bp, synthetic construct
  source 1..15: mol_type = other DNA
ttgcgacaccagttg

SEQ ID NO: 10728 - DNA, 15 bp, synthetic construct
  source 1..15: mol_type = other DNA
ccctggatgtcttcg

SEQ ID NO: 10729 - DNA, 15 bp, synthetic construct
  source 1..15: mol_type = other DNA
agctggctatggcac

SEQ ID NO: 10730 - DNA, 15 bp, synthetic construct
  source 1..15: mol_type = other DNA
aagacactttacagg

SEQ ID NO: 10731 - DNA, 15 bp, synthetic construct
  source 1..15: mol_type = other DNA
tgaggcagagcatac

SEQ ID NO: 10732 - DNA, 15 bp, synthetic construct
  source 1..15: mol_type = other DNA
gtagctgaccgggaa

SEQ ID NO: 10733 - DNA, 15 bp, synthetic construct
  source 1..15: mol_type = other DNA
cttctccttcatcgt

SEQ ID NO: 10734 - DNA, 15 bp, synthetic construct
  source 1..15: mol_type = other DNA
gatcttgaaggcatc

SEQ ID NO: 10735 - DNA, 15 bp, synthetic construct
  source 1..15: mol_type = other DNA
actccatggagaacc

SEQ ID NO: 10736 - DNA, 15 bp, synthetic construct
  source 1..15: mol_type = other DNA
gcctctcacctagat

SEQ ID NO: 10737 - DNA, 15 bp, synthetic construct
  source 1..15: mol_type = other DNA
cattggaacttgtcc

SEQ ID NO: 10738 - DNA, 15 bp, synthetic construct
  source 1..15: mol_type = other DNA
cacttttccaaattc

SEQ ID NO: 10739 - DNA, 15 bp, synthetic construct
  source 1..15: mol_type = other DNA
tccctcggaagaact

SEQ ID NO: 10740 - DNA, 15 bp, synthetic construct
  source 1..15: mol_type = other DNA
cagccgctctagaac

SEQ ID NO: 10741 - DNA, 15 bp, synthetic construct
  source 1..15: mol_type = other DNA
catcgtctttgcagg

SEQ ID NO: 10742 - DNA, 15 bp, synthetic construct
  source 1..15: mol_type = other DNA
tacaatttgatgaca

SEQ ID NO: 10743 - DNA, 15 bp, synthetic construct
  source 1..15: mol_type = other DNA
tcaacgtcctgaagc

SEQ ID NO: 10744 - DNA, 15 bp, synthetic construct
  source 1..15: mol_type = other DNA
aagtgaccactcagc

SEQ ID NO: 10745 - DNA, 15 bp, synthetic construct
  source 1..15: mol_type = other DNA
agctgaggcttcaag

SEQ ID NO: 10746 - DNA, 15 bp, synthetic construct
  source 1..15: mol_type = other DNA
actttgcggctctcg

SEQ ID NO: 10747 - DNA, 15 bp, synthetic construct
  source 1..15: mol_type = other DNA
ggagtacgccaaata

SEQ ID NO: 10748 - DNA, 15 bp, synthetic construct
  source 1..15: mol_type = other DNA
gcacgcaccttcatc

SEQ ID NO: 10749 - DNA, 15 bp, synthetic construct
  source 1..15: mol_type = other DNA
gacctcatctcattt

SEQ ID NO: 10750 - DNA, 15 bp, synthetic construct
  source 1..15: mol_type = other DNA
gtcagggtgtgacat

SEQ ID NO: 10751 - DNA, 15 bp, synthetic construct
  source 1..15: mol_type = other DNA
tcaccaggccgctac

SEQ ID NO: 10752 - DNA, 15 bp, synthetic construct
  source 1..15: mol_type = other DNA
ctcatccccgggact

SEQ ID NO: 10753 - DNA, 15 bp, synthetic construct
  source 1..15: mol_type = other DNA
cactcctctggttac

SEQ ID NO: 10754 - DNA, 15 bp, synthetic construct
  source 1..15: mol_type = other DNA
tgtataagggtgttt

SEQ ID NO: 10755 - DNA, 15 bp, synthetic construct
  source 1..15: mol_type = other DNA
tggtcctttcactct

SEQ ID NO: 10756 - DNA, 15 bp, synthetic construct
  source 1..15: mol_type = other DNA
atgcacacagatgtc

SEQ ID NO: 10757 - DNA, 15 bp, synthetic construct
  source 1..15: mol_type = other DNA
ctttggagttggaga

SEQ ID NO: 10758 - DNA, 15 bp, synthetic construct
  source 1..15: mol_type = other DNA
gcttgtgggaattgg

SEQ ID NO: 10759 - DNA, 15 bp, synthetic construct
  source 1..15: mol_type = other DNA
gcttgttgtatactg

SEQ ID NO: 10760 - DNA, 15 bp, synthetic construct
  source 1..15: mol_type = other DNA
gctagaatctagtaa

SEQ ID NO: 10761 - DNA, 15 bp, synthetic construct
  source 1..15: mol_type = other DNA
ctgatttatgacgac

SEQ ID NO: 10762 - DNA, 15 bp, synthetic construct
  source 1..15: mol_type = other DNA
tcagacatttacaaa

SEQ ID NO: 10763 - DNA, 15 bp, synthetic construct
  source 1..15: mol_type = other DNA
tttggttcttcagtg

SEQ ID NO: 10764 - DNA, 15 bp, synthetic construct
  source 1..15: mol_type = other DNA
ctcagcatgtttctt

SEQ ID NO: 10765 - DNA, 15 bp, synthetic construct
  source 1..15: mol_type = other DNA
ggagccagttgagcc

SEQ ID NO: 10766 - DNA, 15 bp, synthetic construct
  source 1..15: mol_type = other DNA
tcaagtttcttcctg

SEQ ID NO: 10767 - DNA, 15 bp, synthetic construct
  source 1..15: mol_type = other DNA
agcccggctacctgg

SEQ ID NO: 10768 - DNA, 15 bp, synthetic construct
  source 1..15: mol_type = other DNA
cgaaaaggagttaga

SEQ ID NO: 10769 - DNA, 15 bp, synthetic construct
  source 1..15: mol_type = other DNA
ctcatatctgatgct

SEQ ID NO: 10770 - DNA, 15 bp, synthetic construct
  source 1..15: mol_type = other DNA
ccagctcccgtatag

SEQ ID NO: 10771 - DNA, 15 bp, synthetic construct
  source 1..15: mol_type = other DNA
agtaacaaaatatat

SEQ ID NO: 10772 - DNA, 15 bp, synthetic construct
  source 1..15: mol_type = other DNA
caatctgcgtatttg

SEQ ID NO: 10773 - DNA, 15 bp, synthetic construct
  source 1..15: mol_type = other DNA
cagatcatggaggaa

SEQ ID NO: 10774 - DNA, 15 bp, synthetic construct
  source 1..15: mol_type = other DNA
tcctgaaagactgct

SEQ ID NO: 10775 - DNA, 15 bp, synthetic construct
  source 1..15: mol_type = other DNA
gagtttcacacaagc

SEQ ID NO: 10776 - DNA, 15 bp, synthetic construct
  source 1..15: mol_type = other DNA
aatcacatgtgctta

SEQ ID NO: 10777 - DNA, 15 bp, synthetic construct
  source 1..15: mol_type = other DNA
aggaggtcattcttt

SEQ ID NO: 10778 - DNA, 15 bp, synthetic construct
  source 1..15: mol_type = other DNA
tcccataaaagttca

SEQ ID NO: 10779 - DNA, 15 bp, synthetic construct
  source 1..15: mol_type = other DNA
ttagtagcaagcata

SEQ ID NO: 10780 - DNA, 15 bp, synthetic construct
  source 1..15: mol_type = other DNA
actgattgaacatga

SEQ ID NO: 10781 - DNA, 15 bp, synthetic construct
  source 1..15: mol_type = other DNA
ctctctgctttggat

SEQ ID NO: 10782 - DNA, 15 bp, synthetic construct
  source 1..15: mol_type = other DNA
cactagtgttattct

SEQ ID NO: 10783 - DNA, 15 bp, synthetic construct
  source 1..15: mol_type = other DNA
aaccggttcctgatc

SEQ ID NO: 10784 - DNA, 15 bp, synthetic construct
  source 1..15: mol_type = other DNA
aaatgtagaacgaag

SEQ ID NO: 10785 - DNA, 15 bp, synthetic construct
  source 1..15: mol_type = other DNA
atctttccccgtata

SEQ ID NO: 10786 - DNA, 15 bp, synthetic construct
  source 1..15: mol_type = other DNA
tgtggattactggga

SEQ ID NO: 10787 - DNA, 15 bp, synthetic construct
  source 1..15: mol_type = other DNA
caacatcaaacatat

SEQ ID NO: 10788 - DNA, 15 bp, synthetic construct
  source 1..15: mol_type = other DNA
ttatttgacgaggct

SEQ ID NO: 10789 - DNA, 15 bp, synthetic construct
  source 1..15: mol_type = other DNA
ttctccccctcaacg

SEQ ID NO: 10790 - DNA, 15 bp, synthetic construct
  source 1..15: mol_type = other DNA
cgcaatgaattgtgg

SEQ ID NO: 10791 - DNA, 15 bp, synthetic construct
  source 1..15: mol_type = other DNA
tagggttgtcttcct

SEQ ID NO: 10792 - DNA, 15 bp, synthetic construct
  source 1..15: mol_type = other DNA
gtaacagtttcatgt

SEQ ID NO: 10793 - DNA, 15 bp, synthetic construct
  source 1..15: mol_type = other DNA
acttgcatgtcacct

SEQ ID NO: 10794 - DNA, 15 bp, synthetic construct
  source 1..15: mol_type = other DNA
acgcgctgtaataat

SEQ ID NO: 10795 - DNA, 15 bp, synthetic construct
  source 1..15: mol_type = other DNA
gtatgatgcaaaact

SEQ ID NO: 10796 - DNA, 15 bp, synthetic construct
  source 1..15: mol_type = other DNA
gactgactgagctat

SEQ ID NO: 10797 - DNA, 15 bp, synthetic construct
  source 1..15: mol_type = other DNA
acaaccccaaactca

SEQ ID NO: 10798 - DNA, 15 bp, synthetic construct
  source 1..15: mol_type = other DNA
tgtttcaatggagta

SEQ ID NO: 10799 - DNA, 15 bp, synthetic construct
  source 1..15: mol_type = other DNA
gaacttgcagcaaca

SEQ ID NO: 10800 - DNA, 15 bp, synthetic construct
  source 1..15: mol_type = other DNA
gcatactgttgatat

SEQ ID NO: 10801 - DNA, 15 bp, synthetic construct
  source 1..15: mol_type = other DNA
catctactgcccaag

SEQ ID NO: 10802 - DNA, 15 bp, synthetic construct
  source 1..15: mol_type = other DNA
tagcatgttttaact

SEQ ID NO: 10803 - DNA, 15 bp, synthetic construct
  source 1..15: mol_type = other DNA
ttcgtggctgttata

SEQ ID NO: 10804 - DNA, 15 bp, synthetic construct
  source 1..15: mol_type = other DNA
tttcagaagggtaca

SEQ ID NO: 10805 - DNA, 15 bp, synthetic construct
  source 1..15: mol_type = other DNA
tgtctccatagagta

SEQ ID NO: 10806 - DNA, 15 bp, synthetic construct
  source 1..15: mol_type = other DNA
gagtttttcgtgcct

SEQ ID NO: 10807 - DNA, 15 bp, synthetic construct
  source 1..15: mol_type = other DNA
gtaatgatgcttttg

SEQ ID NO: 10808 - DNA, 15 bp, synthetic construct
  source 1..15: mol_type = other DNA
aaacatgacttgaat

SEQ ID NO: 10809 - DNA, 15 bp, synthetic construct
  source 1..15: mol_type = other DNA
tgtggcatgtaggaa

SEQ ID NO: 10810 - DNA, 15 bp, synthetic construct
  source 1..15: mol_type = other DNA
taccattacctgcat

SEQ ID NO: 10811 - DNA, 15 bp, synthetic construct
  source 1..15: mol_type = other DNA
cggtcatcatatgtc

SEQ ID NO: 10812 - DNA, 15 bp, synthetic construct
  source 1..15: mol_type = other DNA
tctgcaccattttta

SEQ ID NO: 10813 - DNA, 15 bp, synthetic construct
  source 1..15: mol_type = other DNA
tttgttctctaacca

SEQ ID NO: 10814 - DNA, 15 bp, synthetic construct
  source 1..15: mol_type = other DNA
atgcaacttgaaccc

SEQ ID NO: 10815 - DNA, 15 bp, synthetic construct
  source 1..15: mol_type = other DNA
aaacataccaagcat

SEQ ID NO: 10816 - DNA, 15 bp, synthetic construct
  source 1..15: mol_type = other DNA
aagaatgagtaggac

SEQ ID NO: 10817 - DNA, 15 bp, synthetic construct
  source 1..15: mol_type = other DNA
cccacctgattaaat

SEQ ID NO: 10818 - DNA, 15 bp, synthetic construct
  source 1..15: mol_type = other DNA
gtgtgcataaaacac

SEQ ID NO: 10819 - DNA, 15 bp, synthetic construct
  source 1..15: mol_type = other DNA
ttctctctgggcatt

SEQ ID NO: 10820 - DNA, 15 bp, synthetic construct
  source 1..15: mol_type = other DNA
acaaagatacttggg

SEQ ID NO: 10821 - DNA, 15 bp, synthetic construct
  source 1..15: mol_type = other DNA
tgatcctacagtggg

SEQ ID NO: 10822 - DNA, 15 bp, synthetic construct
  source 1..15: mol_type = other DNA
ttaatgggtagaaac

SEQ ID NO: 10823 - DNA, 15 bp, synthetic construct
  source 1..15: mol_type = other DNA
tctagtgccatgtcc

SEQ ID NO: 10824 - DNA, 15 bp, synthetic construct
  source 1..15: mol_type = other DNA
tctcctgtgtccact

SEQ ID NO: 10825 - DNA, 15 bp, synthetic construct
  source 1..15: mol_type = other DNA
agccttcaaaggagg

SEQ ID NO: 10826 - DNA, 15 bp, synthetic construct
  source 1..15: mol_type = other DNA
actgggatcctttgg

SEQ ID NO: 10827 - DNA, 15 bp, synthetic construct
  source 1..15: mol_type = other DNA
ctctctctaaatgta

SEQ ID NO: 10828 - DNA, 15 bp, synthetic construct
  source 1..15: mol_type = other DNA
actatacctttacag

SEQ ID NO: 10829 - DNA, 15 bp, synthetic construct
  source 1..15: mol_type = other DNA
tggaaggcaagtgag

SEQ ID NO: 10830 - DNA, 15 bp, synthetic construct
  source 1..15: mol_type = other DNA
ctttgagaatattag

SEQ ID NO: 10831 - DNA, 15 bp, synthetic construct
  source 1..15: mol_type = other DNA
ggataactttgtctt

SEQ ID NO: 10832 - DNA, 15 bp, synthetic construct
  source 1..15: mol_type = other DNA
tctctttaaggaagt

SEQ ID NO: 10833 - DNA, 15 bp, synthetic construct
  source 1..15: mol_type = other DNA
tcttgcttactgacc

SEQ ID NO: 10834 - DNA, 15 bp, synthetic construct
  source 1..15: mol_type = other DNA
agaaacttttatggt

SEQ ID NO: 10835 - DNA, 15 bp, synthetic construct
  source 1..15: mol_type = other DNA
gcatgattctttgtc

SEQ ID NO: 10836 - DNA, 15 bp, synthetic construct
  source 1..15: mol_type = other DNA
tattggatgcccctt

SEQ ID NO: 10837 - DNA, 15 bp, synthetic construct
  source 1..15: mol_type = other DNA
caagatcagggcatg

SEQ ID NO: 10838 - DNA, 15 bp, synthetic construct
  source 1..15: mol_type = other DNA
gaaaatggattatct

SEQ ID NO: 10839 - DNA, 15 bp, synthetic construct
  source 1..15: mol_type = other DNA
attttggcctgagtt

SEQ ID NO: 10840 - DNA, 15 bp, synthetic construct
  source 1..15: mol_type = other DNA
atctgactggaaacg

SEQ ID NO: 10841 - DNA, 15 bp, synthetic construct
  source 1..15: mol_type = other DNA
ctagcagcccaaatt

SEQ ID NO: 10842 - DNA, 15 bp, synthetic construct
  source 1..15: mol_type = other DNA
gtactgccccattag

SEQ ID NO: 10843 - DNA, 15 bp, synthetic construct
  source 1..15: mol_type = other DNA
cttgcagtttttatt

SEQ ID NO: 10844 - DNA, 15 bp, synthetic construct
  source 1..15: mol_type = other DNA
cttgatctcctcctt

SEQ ID NO: 10845 - DNA, 15 bp, synthetic construct
  source 1..15: mol_type = other DNA
actatactctcactt

SEQ ID NO: 10846 - DNA, 15 bp, synthetic construct
  source 1..15: mol_type = other DNA
tgatgatctgtttgg

SEQ ID NO: 10847 - DNA, 15 bp, synthetic construct
  source 1..15: mol_type = other DNA
cgatacagattggca

SEQ ID NO: 10848 - DNA, 15 bp, synthetic construct
  source 1..15: mol_type = other DNA
gggctatggatactt

SEQ ID NO: 10849 - DNA, 15 bp, synthetic construct
  source 1..15: mol_type = other DNA
ctaaagcccaaaggg

SEQ ID NO: 10850 - DNA, 15 bp, synthetic construct
  source 1..15: mol_type = other DNA
aagttccacccctta

SEQ ID NO: 10851 - DNA, 15 bp, synthetic construct
  source 1..15: mol_type = other DNA
ttgtcagtcattgct

SEQ ID NO: 10852 - DNA, 15 bp, synthetic construct
  source 1..15: mol_type = other DNA
ggtggcaagagagaa

SEQ ID NO: 10853 - DNA, 15 bp, synthetic construct
  source 1..15: mol_type = other DNA
aaattcccgtatttg

SEQ ID NO: 10854 - DNA, 15 bp, synthetic construct
  source 1..15: mol_type = other DNA
ccaccaacacctaaa

SEQ ID NO: 10855 - DNA, 15 bp, synthetic construct
  source 1..15: mol_type = other DNA
tttattcttgctttt

SEQ ID NO: 10856 - DNA, 15 bp, synthetic construct
  source 1..15: mol_type = other DNA
ccaagaaccttctga

SEQ ID NO: 10857 - DNA, 15 bp, synthetic construct
  source 1..15: mol_type = other DNA
gagcaatagtcaaaa

SEQ ID NO: 10858 - DNA, 15 bp, synthetic construct
  source 1..15: mol_type = other DNA
agaatctttggcaag

SEQ ID NO: 10859 - DNA, 15 bp, synthetic construct
  source 1..15: mol_type = other DNA
ataccatctcacaac

SEQ ID NO: 10860 - DNA, 15 bp, synthetic construct
  source 1..15: mol_type = other DNA
acacaagtcttcctc

SEQ ID NO: 10861 - DNA, 15 bp, synthetic construct
  source 1..15: mol_type = other DNA
cagagacaattttat

SEQ ID NO: 10862 - DNA, 15 bp, synthetic construct
  source 1..15: mol_type = other DNA
acagaaagtgtctga

SEQ ID NO: 10863 - DNA, 15 bp, synthetic construct
  source 1..15: mol_type = other DNA
agtatttcattttca

SEQ ID NO: 10864 - DNA, 15 bp, synthetic construct
  source 1..15: mol_type = other DNA
caaaagtatttatca

SEQ ID NO: 10865 - DNA, 15 bp, synthetic construct
  source 1..15: mol_type = other DNA
gagcagctgcagtgt

SEQ ID NO: 10866 - DNA, 15 bp, synthetic construct
  source 1..15: mol_type = other DNA
tgactaacaaagtgg

SEQ ID NO: 10867 - DNA, 15 bp, synthetic construct
  source 1..15: mol_type = other DNA
cctgataattgtgat

SEQ ID NO: 10868 - DNA, 15 bp, synthetic construct
  source 1..15: mol_type = other DNA
atctccactgttgac

SEQ ID NO: 10869 - DNA, 15 bp, synthetic construct
  source 1..15: mol_type = other DNA
aatggtcccttactg

SEQ ID NO: 10870 - DNA, 15 bp, synthetic construct
  source 1..15: mol_type = other DNA
caataaccacaaatg

SEQ ID NO: 10871 - DNA, 15 bp, synthetic construct
  source 1..15: mol_type = other DNA
ctgactctggatcgc

SEQ ID NO: 10872 - DNA, 15 bp, synthetic construct
  source 1..15: mol_type = other DNA
aaatcttaatccctt

SEQ ID NO: 10873 - DNA, 15 bp, synthetic construct
  source 1..15: mol_type = other DNA
tgattaatggtttca

SEQ ID NO: 10874 - DNA, 15 bp, synthetic construct
  source 1..15: mol_type = other DNA
atcctttaacaaggt

SEQ ID NO: 10875 - DNA, 15 bp, synthetic construct
  source 1..15: mol_type = other DNA
ttgaaggttggttgg

SEQ ID NO: 10876 - DNA, 15 bp, synthetic construct
  source 1..15: mol_type = other DNA
aattgtattttggct

SEQ ID NO: 10877 - DNA, 15 bp, synthetic construct
  source 1..15: mol_type = other DNA
ttgtcaacaagttaa

SEQ ID NO: 10878 - DNA, 15 bp, synthetic construct
  source 1..15: mol_type = other DNA
cgatattgaagtcct

SEQ ID NO: 10879 - DNA, 15 bp, synthetic construct
  source 1..15: mol_type = other DNA
tctactccatttcct

SEQ ID NO: 10880 - DNA, 15 bp, synthetic construct
  source 1..15: mol_type = other DNA
attacctttcagcat

SEQ ID NO: 10881 - DNA, 15 bp, synthetic construct
  source 1..15: mol_type = other DNA
ctcagtacttttgga

SEQ ID NO: 10882 - DNA, 15 bp, synthetic construct
  source 1..15: mol_type = other DNA
tcttaatgattacta

SEQ ID NO: 10883 - DNA, 15 bp, synthetic construct
  source 1..15: mol_type = other DNA
aatggctctcaagta

SEQ ID NO: 10884 - DNA, 15 bp, synthetic construct
  source 1..15: mol_type = other DNA
aaaggtagtcgactg

SEQ ID NO: 10885 - DNA, 15 bp, synthetic construct
  source 1..15: mol_type = other DNA
caagagcagactatt

SEQ ID NO: 10886 - DNA, 15 bp, synthetic construct
  source 1..15: mol_type = other DNA
ttgaaaatcacttac

SEQ ID NO: 10887 - DNA, 15 bp, synthetic construct
  source 1..15: mol_type = other DNA
ctaggacataattcc

SEQ ID NO: 10888 - DNA, 15 bp, synthetic construct
  source 1..15: mol_type = other DNA
tcagtgccattcagg

SEQ ID NO: 10889 - DNA, 15 bp, synthetic construct
  source 1..15: mol_type = other DNA
atttaggctccttgc

SEQ ID NO: 10890 - DNA, 15 bp, synthetic construct
  source 1..15: mol_type = other DNA
ctccttcagaaacac

SEQ ID NO: 10891 - DNA, 15 bp, synthetic construct
  source 1..15: mol_type = other DNA
tgtgagtacagaaag

SEQ ID NO: 10892 - DNA, 15 bp, synthetic construct
  source 1..15: mol_type = other DNA
atcatttctttggtg

SEQ ID NO: 10893 - DNA, 15 bp, synthetic construct
  source 1..15: mol_type = other DNA
ttatccaggcatatt

SEQ ID NO: 10894 - DNA, 15 bp, synthetic construct
  source 1..15: mol_type = other DNA
catcggcttttatcc

SEQ ID NO: 10895 - DNA, 15 bp, synthetic construct
  source 1..15: mol_type = other DNA
cttacaacgagtggg

SEQ ID NO: 10896 - DNA, 15 bp, synthetic construct
  source 1..15: mol_type = other DNA
tgaagtaggaaacaa

SEQ ID NO: 10897 - DNA, 15 bp, synthetic construct
  source 1..15: mol_type = other DNA
cctcggttattagaa

SEQ ID NO: 10898 - DNA, 15 bp, synthetic construct
  source 1..15: mol_type = other DNA
attctttggattgct

SEQ ID NO: 10899 - DNA, 15 bp, synthetic construct
  source 1..15: mol_type = other DNA
ggattcagacaatga

SEQ ID NO: 10900 - DNA, 15 bp, synthetic construct
  source 1..15: mol_type = other DNA
gtcaaggtgctattg

SEQ ID NO: 10901 - DNA, 15 bp, synthetic construct
  source 1..15: mol_type = other DNA
tcagaggactcacag

SEQ ID NO: 10902 - DNA, 15 bp, synthetic construct
  source 1..15: mol_type = other DNA
tcagctgtgttatta

SEQ ID NO: 10903 - DNA, 15 bp, synthetic construct
  source 1..15: mol_type = other DNA
gcaaaacttggtgta

SEQ ID NO: 10904 - DNA, 15 bp, synthetic construct
  source 1..15: mol_type = other DNA
cgaagtgcaataatc

SEQ ID NO: 10905 - DNA, 15 bp, synthetic construct
  source 1..15: mol_type = other DNA
caaactgggtagcat

SEQ ID NO: 10906 - DNA, 15 bp, synthetic construct
  source 1..15: mol_type = other DNA
atgccagtgaggaaa

SEQ ID NO: 10907 - DNA, 15 bp, synthetic construct
  source 1..15: mol_type = other DNA
tctgggagacattaa

SEQ ID NO: 10908 - DNA, 15 bp, synthetic construct
  source 1..15: mol_type = other DNA
ttttcttggtagtgc

SEQ ID NO: 10909 - DNA, 15 bp, synthetic construct
  source 1..15: mol_type = other DNA
tatgcagagaaacaa

SEQ ID NO: 10910 - DNA, 15 bp, synthetic construct
  source 1..15: mol_type = other DNA
gcaccatggaggtat

SEQ ID NO: 10911 - DNA, 15 bp, synthetic construct
  source 1..15: mol_type = other DNA
gtaggtcagaaaata

SEQ ID NO: 10912 - DNA, 15 bp, synthetic construct
  source 1..15: mol_type = other DNA
agatgtaaacatgcc

SEQ ID NO: 10913 - DNA, 15 bp, synthetic construct
  source 1..15: mol_type = other DNA
ttctgagggaaagta

SEQ ID NO: 10914 - DNA, 15 bp, synthetic construct
  source 1..15: mol_type = other DNA
gtgaagggtccttct

SEQ ID NO: 10915 - DNA, 15 bp, synthetic construct
  source 1..15: mol_type = other DNA
tgggacagaatcaca

SEQ ID NO: 10916 - DNA, 15 bp, synthetic construct
  source 1..15: mol_type = other DNA
ctctcattgagtatc

SEQ ID NO: 10917 - DNA, 15 bp, synthetic construct
  source 1..15: mol_type = other DNA
agaggtgttttccat

SEQ ID NO: 10918 - DNA, 15 bp, synthetic construct
  source 1..15: mol_type = other DNA
tctgaccttaagttt

SEQ ID NO: 10919 - DNA, 15 bp, synthetic construct
  source 1..15: mol_type = other DNA
agatgctggctatct

SEQ ID NO: 10920 - DNA, 15 bp, synthetic construct
  source 1..15: mol_type = other DNA
gcagtgttctccttg

SEQ ID NO: 10921 - DNA, 15 bp, synthetic construct
  source 1..15: mol_type = other DNA
gtaaacagcagctat

SEQ ID NO: 10922 - DNA, 15 bp, synthetic construct
  source 1..15: mol_type = other DNA
gaatagccagaggca

SEQ ID NO: 10923 - DNA, 15 bp, synthetic construct
  source 1..15: mol_type = other DNA
ccctcttagtttcct

SEQ ID NO: 10924 - DNA, 15 bp, synthetic construct
  source 1..15: mol_type = other DNA
ttctcctgtgactca

SEQ ID NO: 10925 - DNA, 15 bp, synthetic construct
  source 1..15: mol_type = other DNA
ccctcttagtttcct

SEQ ID NO: 10926 - DNA, 15 bp, synthetic construct
  source 1..15: mol_type = other DNA
ttctcctgtgactca

SEQ ID NO: 10927 - DNA, 15 bp, synthetic construct
  source 1..15: mol_type = other DNA
tcccatgcagtctta

SEQ ID NO: 10928 - DNA, 15 bp, synthetic construct
  source 1..15: mol_type = other DNA
acattccaagtggca

SEQ ID NO: 10929 - DNA, 15 bp, synthetic construct
  source 1..15: mol_type = other DNA
acactgcctgatatg

SEQ ID NO: 10930 - DNA, 15 bp, synthetic construct
  source 1..15: mol_type = other DNA
tttgtgatttgattt

SEQ ID NO: 10931 - DNA, 15 bp, synthetic construct
  source 1..15: mol_type = other DNA
ctttctgtggctata

SEQ ID NO: 10932 - DNA, 15 bp, synthetic construct
  source 1..15: mol_type = other DNA
caattgcaaaacaag

SEQ ID NO: 10933 - DNA, 15 bp, synthetic construct
  source 1..15: mol_type = other DNA
ttgtatgttttcctt

SEQ ID NO: 10934 - DNA, 15 bp, synthetic construct
  source 1..15: mol_type = other DNA
ttctaggcacactgc

SEQ ID NO: 10935 - DNA, 15 bp, synthetic construct
  source 1..15: mol_type = other DNA
ttggcatctgcagtt

SEQ ID NO: 10936 - DNA, 15 bp, synthetic construct
  source 1..15: mol_type = other DNA
ggcgctctagactta

SEQ ID NO: 10937 - DNA, 15 bp, synthetic construct
  source 1..15: mol_type = other DNA
gtcctcacagtgatg

SEQ ID NO: 10938 - DNA, 15 bp, synthetic construct
  source 1..15: mol_type = other DNA
acaagagtaccacat

SEQ ID NO: 10939 - DNA, 15 bp, synthetic construct
  source 1..15: mol_type = other DNA
ccagaggtgagtagc

SEQ ID NO: 10940 - DNA, 15 bp, synthetic construct
  source 1..15: mol_type = other DNA
acaatgcccaattaa

SEQ ID NO: 10941 - DNA, 15 bp, synthetic construct
  source 1..15: mol_type = other DNA
gccttgcttgtagtt

SEQ ID NO: 10942 - DNA, 15 bp, synthetic construct
  source 1..15: mol_type = other DNA
gcttagacagtaaaa

SEQ ID NO: 10943 - DNA, 15 bp, synthetic construct
  source 1..15: mol_type = other DNA
ctcacaagtaaaatc

SEQ ID NO: 10944 - DNA, 15 bp, synthetic construct
  source 1..15: mol_type = other DNA
ttcattcagcgacga

SEQ ID NO: 10945 - DNA, 15 bp, synthetic construct
  source 1..15: mol_type = other DNA
atcattagaactccc

SEQ ID NO: 10946 - DNA, 15 bp, synthetic construct
  source 1..15: mol_type = other DNA
gatgcaaaggagcga

SEQ ID NO: 10947 - DNA, 15 bp, synthetic construct
  source 1..15: mol_type = other DNA
caagctatattggct

SEQ ID NO: 10948 - DNA, 15 bp, synthetic construct
  source 1..15: mol_type = other DNA
caggaaggcttaaac

SEQ ID NO: 10949 - DNA, 15 bp, synthetic construct
  source 1..15: mol_type = other DNA
gtgactttgatccct

SEQ ID NO: 10950 - DNA, 15 bp, synthetic construct
  source 1..15: mol_type = other DNA
ccgctgaactattgt

SEQ ID NO: 10951 - DNA, 15 bp, synthetic construct
  source 1..15: mol_type = other DNA
atcttgtatttcttc

SEQ ID NO: 10952 - DNA, 15 bp, synthetic construct
  source 1..15: mol_type = other DNA
aaaagtgctccaatt

SEQ ID NO: 10953 - DNA, 15 bp, synthetic construct
  source 1..15: mol_type = other DNA
ctttctacctgtcat

SEQ ID NO: 10954 - DNA, 15 bp, synthetic construct
  source 1..15: mol_type = other DNA
gtagcaatccccata

SEQ ID NO: 10955 - DNA, 15 bp, synthetic construct
  source 1..15: mol_type = other DNA
ctagcacctctgtat

SEQ ID NO: 10956 - DNA, 15 bp, synthetic construct
  source 1..15: mol_type = other DNA
tggattctcccaacc

SEQ ID NO: 10957 - DNA, 15 bp, synthetic construct
  source 1..15: mol_type = other DNA
cactcctcagtttgc

SEQ ID NO: 10958 - DNA, 15 bp, synthetic construct
  source 1..15: mol_type = other DNA
ctgctgggtttttaa

SEQ ID NO: 10959 - DNA, 15 bp, synthetic construct
  source 1..15: mol_type = other DNA
gacatcaaacctgtt

SEQ ID NO: 10960 - DNA, 15 bp, synthetic construct
  source 1..15: mol_type = other DNA
ggtaaatggctaatc

SEQ ID NO: 10961 - DNA, 15 bp, synthetic construct
  source 1..15: mol_type = other DNA
aagatacaagctcag

SEQ ID NO: 10962 - DNA, 15 bp, synthetic construct
  source 1..15: mol_type = other DNA
ttttacctgctgaat

SEQ ID NO: 10963 - DNA, 15 bp, synthetic construct
  source 1..15: mol_type = other DNA
gacaaagaggtgatc

SEQ ID NO: 10964 - DNA, 15 bp, synthetic construct
  source 1..15: mol_type = other DNA
gttgaggaacttcac

SEQ ID NO: 10965 - DNA, 15 bp, synthetic construct
  source 1..15: mol_type = other DNA
gagttggatgaaatg

SEQ ID NO: 10966 - DNA, 15 bp, synthetic construct
  source 1..15: mol_type = other DNA
tggtgtggtagtctt

SEQ ID NO: 10967 - DNA, 15 bp, synthetic construct
  source 1..15: mol_type = other DNA
cgactatgtgctttt

SEQ ID NO: 10968 - DNA, 15 bp, synthetic construct
  source 1..15: mol_type = other DNA
aaatttcaccagctt

SEQ ID NO: 10969 - DNA, 15 bp, synthetic construct
  source 1..15: mol_type = other DNA
acaccaatggaaggt

SEQ ID NO: 10970 - DNA, 15 bp, synthetic construct
  source 1..15: mol_type = other DNA
tactatacctgggtt

SEQ ID NO: 10971 - DNA, 15 bp, synthetic construct
  source 1..15: mol_type = other DNA
ggaagttgttttgtt

SEQ ID NO: 10972 - DNA, 15 bp, synthetic construct
  source 1..15: mol_type = other DNA
attatctcttacatc

SEQ ID NO: 10973 - DNA, 15 bp, synthetic construct
  source 1..15: mol_type = other DNA
ggagtgcaagctcac

SEQ ID NO: 10974 - DNA, 15 bp, synthetic construct
  source 1..15: mol_type = other DNA
tcactgggagaggag

SEQ ID NO: 10975 - DNA, 15 bp, synthetic construct
  source 1..15: mol_type = other DNA
ctccttttctagctc

SEQ ID NO: 10976 - DNA, 15 bp, synthetic construct
  source 1..15: mol_type = other DNA
agccagtgggaaatg

SEQ ID NO: 10977 - DNA, 15 bp, synthetic construct
  source 1..15: mol_type = other DNA
cctgggatctccctc

SEQ ID NO: 10978 - DNA, 15 bp, synthetic construct
  source 1..15: mol_type = other DNA
ccttggtttttctca

SEQ ID NO: 10979 - DNA, 15 bp, synthetic construct
  source 1..15: mol_type = other DNA
caggattgtaagcac

SEQ ID NO: 10980 - DNA, 15 bp, synthetic construct
  source 1..15: mol_type = other DNA
tacttcagggcttgg

SEQ ID NO: 10981 - DNA, 15 bp, synthetic construct
  source 1..15: mol_type = other DNA
cttggcatattgtat

SEQ ID NO: 10982 - DNA, 15 bp, synthetic construct
  source 1..15: mol_type = other DNA
tccataaaagcaagg

SEQ ID NO: 10983 - DNA, 15 bp, synthetic construct
  source 1..15: mol_type = other DNA
tcgatggacatcaac

SEQ ID NO: 10984 - DNA, 15 bp, synthetic construct
  source 1..15: mol_type = other DNA
cctgttaaacatccg

SEQ ID NO: 10985 - DNA, 15 bp, synthetic construct
  source 1..15: mol_type = other DNA
tctcacagttacaca

SEQ ID NO: 10986 - DNA, 15 bp, synthetic construct
  source 1..15: mol_type = other DNA
cctttgggtcaatca

SEQ ID NO: 10987 - DNA, 15 bp, synthetic construct
  source 1..15: mol_type = other DNA
ggagtgcaagctcat

SEQ ID NO: 10988 - DNA, 15 bp, synthetic construct
  source 1..15: mol_type = other DNA
tcactgggagaggag

SEQ ID NO: 10989 - DNA, 15 bp, synthetic construct
  source 1..15: mol_type = other DNA
gctctcaaaggtcta

SEQ ID NO: 10990 - DNA, 15 bp, synthetic construct
  source 1..15: mol_type = other DNA
cagccagtgggaaaa

SEQ ID NO: 10991 - DNA, 15 bp, synthetic construct
  source 1..15: mol_type = other DNA
cctgggatctccctc

SEQ ID NO: 10992 - DNA, 15 bp, synthetic construct
  source 1..15: mol_type = other DNA
ccttggtttttctca

SEQ ID NO: 10993 - DNA, 15 bp, synthetic construct
  source 1..15: mol_type = other DNA
taggtaagataattt

SEQ ID NO: 10994 - DNA, 15 bp, synthetic construct
  source 1..15: mol_type = other DNA
cagatcacattgcag

SEQ ID NO: 10995 - DNA, 15 bp, synthetic construct
  source 1..15: mol_type = other DNA
aataatttttctcct

SEQ ID NO: 10996 - DNA, 15 bp, synthetic construct
  source 1..15: mol_type = other DNA
gttcatgtccattga

SEQ ID NO: 10997 - DNA, 15 bp, synthetic construct
  source 1..15: mol_type = other DNA
ttgcttcctgatgaa

SEQ ID NO: 10998 - DNA, 15 bp, synthetic construct
  source 1..15: mol_type = other DNA
ctgattgaccagtta

SEQ ID NO: 10999 - DNA, 15 bp, synthetic construct
  source 1..15: mol_type = other DNA
ttggaaaacactgca

SEQ ID NO: 11000 - DNA, 15 bp, synthetic construct
  source 1..15: mol_type = other DNA
cccaaaatcttttct

SEQ ID NO: 11001 - DNA, 15 bp, synthetic construct
  source 1..15: mol_type = other DNA
acgtgtgattggcag

SEQ ID NO: 11002 - DNA, 15 bp, synthetic construct
  source 1..15: mol_type = other DNA
ttctgaatttaatgt

SEQ ID NO: 11003 - DNA, 15 bp, synthetic construct
  source 1..15: mol_type = other DNA
cagggtcaaagatat

SEQ ID NO: 11004 - DNA, 15 bp, synthetic construct
  source 1..15: mol_type = other DNA
cgctacgtgatgtcc

SEQ ID NO: 11005 - DNA, 15 bp, synthetic construct
  source 1..15: mol_type = other DNA
actggcctgatcatt

SEQ ID NO: 11006 - DNA, 15 bp, synthetic construct
  source 1..15: mol_type = other DNA
atgttaacaatcctc

SEQ ID NO: 11007 - DNA, 15 bp, synthetic construct
  source 1..15: mol_type = other DNA
ttagccaagataagt

SEQ ID NO: 11008 - DNA, 15 bp, synthetic construct
  source 1..15: mol_type = other DNA
acattacccagaagc

SEQ ID NO: 11009 - DNA, 15 bp, synthetic construct
  source 1..15: mol_type = other DNA
caagtagtaagaggc

SEQ ID NO: 11010 - DNA, 15 bp, synthetic construct
  source 1..15: mol_type = other DNA
gaatgggtaccaagc

SEQ ID NO: 11011 - DNA, 15 bp, synthetic construct
  source 1..15: mol_type = other DNA
aatctaggctttgca

SEQ ID NO: 11012 - DNA, 15 bp, synthetic construct
  source 1..15: mol_type = other DNA
cttggtgattgacta

SEQ ID NO: 11013 - DNA, 15 bp, synthetic construct
  source 1..15: mol_type = other DNA
gagacaaggctggtt

SEQ ID NO: 11014 - DNA, 15 bp, synthetic construct
  source 1..15: mol_type = other DNA
tttaattataggttg

SEQ ID NO: 11015 - DNA, 15 bp, synthetic construct
  source 1..15: mol_type = other DNA
aagagtctgataaat

SEQ ID NO: 11016 - DNA, 15 bp, synthetic construct
  source 1..15: mol_type = other DNA
aaaatgctagtcagg

SEQ ID NO: 11017 - DNA, 15 bp, synthetic construct
  source 1..15: mol_type = other DNA
attttccgaactgtc

SEQ ID NO: 11018 - DNA, 15 bp, synthetic construct
  source 1..15: mol_type = other DNA
caatgctgcctcctt

SEQ ID NO: 11019 - DNA, 15 bp, synthetic construct
  source 1..15: mol_type = other DNA
ttgaaagcctttgca

SEQ ID NO: 11020 - DNA, 15 bp, synthetic construct
  source 1..15: mol_type = other DNA
gaagggtacggtgaa

SEQ ID NO: 11021 - DNA, 15 bp, synthetic construct
  source 1..15: mol_type = other DNA
tcccctctaaatccc

SEQ ID NO: 11022 - DNA, 15 bp, synthetic construct
  source 1..15: mol_type = other DNA
tattcggcccaataa

SEQ ID NO: 11023 - DNA, 15 bp, synthetic construct
  source 1..15: mol_type = other DNA
aacattgttagagaa

SEQ ID NO: 11024 - DNA, 15 bp, synthetic construct
  source 1..15: mol_type = other DNA
aaaataccgccttca

SEQ ID NO: 11025 - DNA, 15 bp, synthetic construct
  source 1..15: mol_type = other DNA
tagatccctacttaa

SEQ ID NO: 11026 - DNA, 15 bp, synthetic construct
  source 1..15: mol_type = other DNA
aagcctattggtagt

SEQ ID NO: 11027 - DNA, 15 bp, synthetic construct
  source 1..15: mol_type = other DNA
tcacttcaacttcat

SEQ ID NO: 11028 - DNA, 15 bp, synthetic construct
  source 1..15: mol_type = other DNA
cagagcaaaagtacc

SEQ ID NO: 11029 - DNA, 15 bp, synthetic construct
  source 1..15: mol_type = other DNA
atgagaaagcctgtt

SEQ ID NO: 11030 - DNA, 15 bp, synthetic construct
  source 1..15: mol_type = other DNA
ttgagttaaccttgt

SEQ ID NO: 11031 - DNA, 15 bp, synthetic construct
  source 1..15: mol_type = other DNA
caaagttaccttgtc

SEQ ID NO: 11032 - DNA, 15 bp, synthetic construct
  source 1..15: mol_type = other DNA
ttttatctaaacgct

SEQ ID NO: 11033 - DNA, 15 bp, synthetic construct
  source 1..15: mol_type = other DNA
aaaatataacactcc

SEQ ID NO: 11034 - DNA, 15 bp, synthetic construct
  source 1..15: mol_type = other DNA
ctggccgatattgct

SEQ ID NO: 11035 - DNA, 15 bp, synthetic construct
  source 1..15: mol_type = other DNA
gagtggaagtacggg

SEQ ID NO: 11036 - DNA, 15 bp, synthetic construct
  source 1..15: mol_type = other DNA
tcactctgtgtcgta

SEQ ID NO: 11037 - DNA, 15 bp, synthetic construct
  source 1..15: mol_type = other DNA
ccacccccacaacgt

SEQ ID NO: 11038 - DNA, 15 bp, synthetic construct
  source 1..15: mol_type = other DNA
agtgttctttctggt

SEQ ID NO: 11039 - DNA, 15 bp, synthetic construct
  source 1..15: mol_type = other DNA
cagtcgcctctgaag

SEQ ID NO: 11040 - DNA, 15 bp, synthetic construct
  source 1..15: mol_type = other DNA
gcgtcagacgctatg

SEQ ID NO: 11041 - DNA, 15 bp, synthetic construct
  source 1..15: mol_type = other DNA
gtctcactctgggac

SEQ ID NO: 11042 - DNA, 15 bp, synthetic construct
  source 1..15: mol_type = other DNA
cagtttcccatagtc

SEQ ID NO: 11043 - DNA, 15 bp, synthetic construct
  source 1..15: mol_type = other DNA
attgcgggtatctac

SEQ ID NO: 11044 - DNA, 15 bp, synthetic construct
  source 1..15: mol_type = other DNA
cctctcccataataa

SEQ ID NO: 11045 - DNA, 15 bp, synthetic construct
  source 1..15: mol_type = other DNA
tgggaaggaaatgtg

SEQ ID NO: 11046 - DNA, 15 bp, synthetic construct
  source 1..15: mol_type = other DNA
ggctcacactcgcat

SEQ ID NO: 11047 - DNA, 15 bp, synthetic construct
  source 1..15: mol_type = other DNA
acaggctcctgctag

SEQ ID NO: 11048 - DNA, 15 bp, synthetic construct
  source 1..15: mol_type = other DNA
gctgacggtcatctc

SEQ ID NO: 11049 - DNA, 15 bp, synthetic construct
  source 1..15: mol_type = other DNA
acaggctcctgctag

SEQ ID NO: 11050 - DNA, 15 bp, synthetic construct
  source 1..15: mol_type = other DNA
gctgacggtcatctc

SEQ ID NO: 11051 - DNA, 15 bp, synthetic construct
  source 1..15: mol_type = other DNA
ctgaggcaccttcgc

SEQ ID NO: 11052 - DNA, 15 bp, synthetic construct
  source 1..15: mol_type = other DNA
acaccttggtgtagt

SEQ ID NO: 11053 - DNA, 15 bp, synthetic construct
  source 1..15: mol_type = other DNA
ttgctactatcgtgg

SEQ ID NO: 11054 - DNA, 15 bp, synthetic construct
  source 1..15: mol_type = other DNA
tatagctgccgttca

SEQ ID NO: 11055 - DNA, 15 bp, synthetic construct
  source 1..15: mol_type = other DNA
gtgattgcttacact

SEQ ID NO: 11056 - DNA, 15 bp, synthetic construct
  source 1..15: mol_type = other DNA
tcgggtgctgggaaa

SEQ ID NO: 11057 - DNA, 15 bp, synthetic construct
  source 1..15: mol_type = other DNA
gatctctctccaatc

SEQ ID NO: 11058 - DNA, 15 bp, synthetic construct
  source 1..15: mol_type = other DNA
tggaaacagatctca

SEQ ID NO: 11059 - DNA, 15 bp, synthetic construct
  source 1..15: mol_type = other DNA
agggcatctctttga

SEQ ID NO: 11060 - DNA, 15 bp, synthetic construct
  source 1..15: mol_type = other DNA
gtcacccatgacaat

SEQ ID NO: 11061 - DNA, 15 bp, synthetic construct
  source 1..15: mol_type = other DNA
gtatactctggactc

SEQ ID NO: 11062 - DNA, 15 bp, synthetic construct
  source 1..15: mol_type = other DNA
ggcatcttcccattg

SEQ ID NO: 11063 - DNA, 15 bp, synthetic construct
  source 1..15: mol_type = other DNA
gtgcaggagctgtgg

SEQ ID NO: 11064 - DNA, 15 bp, synthetic construct
  source 1..15: mol_type = other DNA
tttctgaaaggaaga

SEQ ID NO: 11065 - DNA, 15 bp, synthetic construct
  source 1..15: mol_type = other DNA
ggacttcaatgttct

SEQ ID NO: 11066 - DNA, 15 bp, synthetic construct
  source 1..15: mol_type = other DNA
ggtgaaatccatgcg

SEQ ID NO: 11067 - DNA, 15 bp, synthetic construct
  source 1..15: mol_type = other DNA
atcatggactggttt

SEQ ID NO: 11068 - DNA, 15 bp, synthetic construct
  source 1..15: mol_type = other DNA
aaggagcctctatcg

SEQ ID NO: 11069 - DNA, 15 bp, synthetic construct
  source 1..15: mol_type = other DNA
atgtctgaaaacaga

SEQ ID NO: 11070 - DNA, 15 bp, synthetic construct
  source 1..15: mol_type = other DNA
taggtcagtgcaact

SEQ ID NO: 11071 - DNA, 15 bp, synthetic construct
  source 1..15: mol_type = other DNA
tgacattcttgacca

SEQ ID NO: 11072 - DNA, 15 bp, synthetic construct
  source 1..15: mol_type = other DNA
agtgtcagctgtgtg

SEQ ID NO: 11073 - DNA, 15 bp, synthetic construct
  source 1..15: mol_type = other DNA
aaacacgagttcaat

SEQ ID NO: 11074 - DNA, 15 bp, synthetic construct
  source 1..15: mol_type = other DNA
ccaggacaactactc

SEQ ID NO: 11075 - DNA, 15 bp, synthetic construct
  source 1..15: mol_type = other DNA
ccgagctattttcag

SEQ ID NO: 11076 - DNA, 15 bp, synthetic construct
  source 1..15: mol_type = other DNA
actgaccactttgtt

SEQ ID NO: 11077 - DNA, 15 bp, synthetic construct
  source 1..15: mol_type = other DNA
atgagtcttgaaggg

SEQ ID NO: 11078 - DNA, 15 bp, synthetic construct
  source 1..15: mol_type = other DNA
ttctcctcaggacta

SEQ ID NO: 11079 - DNA, 15 bp, synthetic construct
  source 1..15: mol_type = other DNA
agtgagcataaatcc

SEQ ID NO: 11080 - DNA, 15 bp, synthetic construct
  source 1..15: mol_type = other DNA
aggtaggaagtgatt

SEQ ID NO: 11081 - DNA, 15 bp, synthetic construct
  source 1..15: mol_type = other DNA
gacatggaaaaggga

SEQ ID NO: 11082 - DNA, 15 bp, synthetic construct
  source 1..15: mol_type = other DNA
ttggtgtatatgtgt

SEQ ID NO: 11083 - DNA, 15 bp, synthetic construct
  source 1..15: mol_type = other DNA
ataatcagcaacacc

SEQ ID NO: 11084 - DNA, 15 bp, synthetic construct
  source 1..15: mol_type = other DNA
gtgtttcttctcatg

SEQ ID NO: 11085 - DNA, 15 bp, synthetic construct
  source 1..15: mol_type = other DNA
ttttccttgtcttac

SEQ ID NO: 11086 - DNA, 15 bp, synthetic construct
  source 1..15: mol_type = other DNA
gctagagaagtgtat

SEQ ID NO: 11087 - DNA, 15 bp, synthetic construct
  source 1..15: mol_type = other DNA
ggatgaaggatagct

SEQ ID NO: 11088 - DNA, 15 bp, synthetic construct
  source 1..15: mol_type = other DNA
ggattggtctaatct

SEQ ID NO: 11089 - DNA, 15 bp, synthetic construct
  source 1..15: mol_type = other DNA
gcctagaaagatgag

SEQ ID NO: 11090 - DNA, 15 bp, synthetic construct
  source 1..15: mol_type = other DNA
ccagagccagcttat

SEQ ID NO: 11091 - DNA, 15 bp, synthetic construct
  source 1..15: mol_type = other DNA
cctacccatctagga

SEQ ID NO: 11092 - DNA, 15 bp, synthetic construct
  source 1..15: mol_type = other DNA
ggcagaaccttacac

SEQ ID NO: 11093 - DNA, 15 bp, synthetic construct
  source 1..15: mol_type = other DNA
cctttattttgtcaa

SEQ ID NO: 11094 - DNA, 15 bp, synthetic construct
  source 1..15: mol_type = other DNA
gttacaagcctttct

SEQ ID NO: 11095 - DNA, 15 bp, synthetic construct
  source 1..15: mol_type = other DNA
ttcatcagttctgtg

SEQ ID NO: 11096 - DNA, 15 bp, synthetic construct
  source 1..15: mol_type = other DNA
tccaatacttacagt

SEQ ID NO: 11097 - DNA, 15 bp, synthetic construct
  source 1..15: mol_type = other DNA
ccaatagccttacct

SEQ ID NO: 11098 - DNA, 15 bp, synthetic construct
  source 1..15: mol_type = other DNA
caagactttgatgat

SEQ ID NO: 11099 - DNA, 15 bp, synthetic construct
  source 1..15: mol_type = other DNA
taaagaatggtaatc

SEQ ID NO: 11100 - DNA, 15 bp, synthetic construct
  source 1..15: mol_type = other DNA
ctctcttattctctt

SEQ ID NO: 11101 - DNA, 15 bp, synthetic construct
  source 1..15: mol_type = other DNA
ctttgagagatctgc

SEQ ID NO: 11102 - DNA, 15 bp, synthetic construct
  source 1..15: mol_type = other DNA
ggaaaagaccctgat

SEQ ID NO: 11103 - DNA, 15 bp, synthetic construct
  source 1..15: mol_type = other DNA
ttctcattgactgtc

SEQ ID NO: 11104 - DNA, 15 bp, synthetic construct
  source 1..15: mol_type = other DNA
ggtttaaatcagagg

SEQ ID NO: 11105 - DNA, 15 bp, synthetic construct
  source 1..15: mol_type = other DNA
agccgcttggtgttg

SEQ ID NO: 11106 - DNA, 15 bp, synthetic construct
  source 1..15: mol_type = other DNA
acagggatgaaagag

SEQ ID NO: 11107 - DNA, 15 bp, synthetic construct
  source 1..15: mol_type = other DNA
gcaagttgcggctac

SEQ ID NO: 11108 - DNA, 15 bp, synthetic construct
  source 1..15: mol_type = other DNA
cctctcaaactcaac

SEQ ID NO: 11109 - DNA, 15 bp, synthetic construct
  source 1..15: mol_type = other DNA
ttttctcctcaagtc

SEQ ID NO: 11110 - DNA, 15 bp, synthetic construct
  source 1..15: mol_type = other DNA
ctcacggtgcatcgc

SEQ ID NO: 11111 - DNA, 15 bp, synthetic construct
  source 1..15: mol_type = other DNA
catggatatgcactg

SEQ ID NO: 11112 - DNA, 15 bp, synthetic construct
  source 1..15: mol_type = other DNA
agaatgggtgacaga

SEQ ID NO: 11113 - DNA, 15 bp, synthetic construct
  source 1..15: mol_type = other DNA
gcggaccctgactaa

SEQ ID NO: 11114 - DNA, 15 bp, synthetic construct
  source 1..15: mol_type = other DNA
gcgtctcccgggaca

SEQ ID NO: 11115 - DNA, 15 bp, synthetic construct
  source 1..15: mol_type = other DNA
taccccttgtcctcc

SEQ ID NO: 11116 - DNA, 15 bp, synthetic construct
  source 1..15: mol_type = other DNA
tgggcgtcgccactt

SEQ ID NO: 11117 - DNA, 15 bp, synthetic construct
  source 1..15: mol_type = other DNA
cggcgcaggtactac

SEQ ID NO: 11118 - DNA, 15 bp, synthetic construct
  source 1..15: mol_type = other DNA
caggcgaacatagtc

SEQ ID NO: 11119 - DNA, 15 bp, synthetic construct
  source 1..15: mol_type = other DNA
ttgctgaatacaaac

SEQ ID NO: 11120 - DNA, 15 bp, synthetic construct
  source 1..15: mol_type = other DNA
tctgacagaaggatt

SEQ ID NO: 11121 - DNA, 15 bp, synthetic construct
  source 1..15: mol_type = other DNA
gggcatttgatgtgt

SEQ ID NO: 11122 - DNA, 15 bp, synthetic construct
  source 1..15: mol_type = other DNA
gttggcaaataggtt

SEQ ID NO: 11123 - DNA, 15 bp, synthetic construct
  source 1..15: mol_type = other DNA
ctgatgccatttcct

SEQ ID NO: 11124 - DNA, 15 bp, synthetic construct
  source 1..15: mol_type = other DNA
tctcacagcagagca

SEQ ID NO: 11125 - DNA, 15 bp, synthetic construct
  source 1..15: mol_type = other DNA
gtagcccttagaagg

SEQ ID NO: 11126 - DNA, 15 bp, synthetic construct
  source 1..15: mol_type = other DNA
tgaatgttctctaac

SEQ ID NO: 11127 - DNA, 15 bp, synthetic construct
  source 1..15: mol_type = other DNA
caggtcctcaggtcc

SEQ ID NO: 11128 - DNA, 15 bp, synthetic construct
  source 1..15: mol_type = other DNA
tgggaatctccattg

SEQ ID NO: 11129 - DNA, 15 bp, synthetic construct
  source 1..15: mol_type = other DNA
ccagatgtgtctgag

SEQ ID NO: 11130 - DNA, 15 bp, synthetic construct
  source 1..15: mol_type = other DNA
tgaacaagtttttga

SEQ ID NO: 11131 - DNA, 15 bp, synthetic construct
  source 1..15: mol_type = other DNA
gagagctgtcacttt

SEQ ID NO: 11132 - DNA, 15 bp, synthetic construct
  source 1..15: mol_type = other DNA
tgtgtgcctgacacg

SEQ ID NO: 11133 - DNA, 15 bp, synthetic construct
  source 1..15: mol_type = other DNA
gtcaagtcgagtcta

SEQ ID NO: 11134 - DNA, 15 bp, synthetic construct
  source 1..15: mol_type = other DNA
tttagaagcctcgtt

SEQ ID NO: 11135 - DNA, 15 bp, synthetic construct
  source 1..15: mol_type = other DNA
ctctccgtgcagtac

SEQ ID NO: 11136 - DNA, 15 bp, synthetic construct
  source 1..15: mol_type = other DNA
cccacaatttagttc

SEQ ID NO: 11137 - DNA, 15 bp, synthetic construct
  source 1..15: mol_type = other DNA
gctattctgtccctc

SEQ ID NO: 11138 - DNA, 15 bp, synthetic construct
  source 1..15: mol_type = other DNA
ctccaagtttccatg

SEQ ID NO: 11139 - DNA, 15 bp, synthetic construct
  source 1..15: mol_type = other DNA
tgcaggcgtctgatc

SEQ ID NO: 11140 - DNA, 15 bp, synthetic construct
  source 1..15: mol_type = other DNA
ctcagtgctgcacta

SEQ ID NO: 11141 - DNA, 15 bp, synthetic construct
  source 1..15: mol_type = other DNA
cttctcctgtgttaa

SEQ ID NO: 11142 - DNA, 15 bp, synthetic construct
  source 1..15: mol_type = other DNA
atgtgaagggttgcg

SEQ ID NO: 11143 - DNA, 15 bp, synthetic construct
  source 1..15: mol_type = other DNA
gagtcagtgtcagtc

SEQ ID NO: 11144 - DNA, 15 bp, synthetic construct
  source 1..15: mol_type = other DNA
tactttgggttcaca

SEQ ID NO: 11145 - DNA, 15 bp, synthetic construct
  source 1..15: mol_type = other DNA
ccaccctatgattgg

SEQ ID NO: 11146 - DNA, 15 bp, synthetic construct
  source 1..15: mol_type = other DNA
gtcgttcgtgtcctc

SEQ ID NO: 11147 - DNA, 15 bp, synthetic construct
  source 1..15: mol_type = other DNA
gagacggtgatcatc

SEQ ID NO: 11148 - DNA, 15 bp, synthetic construct
  source 1..15: mol_type = other DNA
gtctgaggtgcggat

SEQ ID NO: 11149 - DNA, 15 bp, synthetic construct
  source 1..15: mol_type = other DNA
agaacatcaataacg

SEQ ID NO: 11150 - DNA, 15 bp, synthetic construct
  source 1..15: mol_type = other DNA
cacaggtaataggac

SEQ ID NO: 11151 - DNA, 15 bp, synthetic construct
  source 1..15: mol_type = other DNA
aaccgctacgcaaga

SEQ ID NO: 11152 - DNA, 15 bp, synthetic construct
  source 1..15: mol_type = other DNA
agcgaaatgaagatc

SEQ ID NO: 11153 - DNA, 15 bp, synthetic construct
  source 1..15: mol_type = other DNA
atcgtaggcgaagag

SEQ ID NO: 11154 - DNA, 15 bp, synthetic construct
  source 1..15: mol_type = other DNA
gagcgtggtgttgac

SEQ ID NO: 11155 - DNA, 15 bp, synthetic construct
  source 1..15: mol_type = other DNA
acgccaagcgcatcg

SEQ ID NO: 11156 - DNA, 15 bp, synthetic construct
  source 1..15: mol_type = other DNA
atcatgaaaaacttg

SEQ ID NO: 11157 - DNA, 15 bp, synthetic construct
  source 1..15: mol_type = other DNA
ctccaccatcggtat

SEQ ID NO: 11158 - DNA, 15 bp, synthetic construct
  source 1..15: mol_type = other DNA
ttcagctcctcctta

SEQ ID NO: 11159 - DNA, 15 bp, synthetic construct
  source 1..15: mol_type = other DNA
tcaccgatccctaca

SEQ ID NO: 11160 - DNA, 15 bp, synthetic construct
  source 1..15: mol_type = other DNA
agtcatcgggatcca

SEQ ID NO: 11161 - DNA, 15 bp, synthetic construct
  source 1..15: mol_type = other DNA
ttgtcaaagacttgg

SEQ ID NO: 11162 - DNA, 15 bp, synthetic construct
  source 1..15: mol_type = other DNA
gaaatcccggtcaac

SEQ ID NO: 11163 - DNA, 15 bp, synthetic construct
  source 1..15: mol_type = other DNA
tgtggaagtggatca

SEQ ID NO: 11164 - DNA, 15 bp, synthetic construct
  source 1..15: mol_type = other DNA
tatccctctgtatag

SEQ ID NO: 11165 - DNA, 15 bp, synthetic construct
  source 1..15: mol_type = other DNA
tttaccatatcacat

SEQ ID NO: 11166 - DNA, 15 bp, synthetic construct
  source 1..15: mol_type = other DNA
tttcgggaaatacac

SEQ ID NO: 11167 - DNA, 15 bp, synthetic construct
  source 1..15: mol_type = other DNA
agccctcatctcatg

SEQ ID NO: 11168 - DNA, 15 bp, synthetic construct
  source 1..15: mol_type = other DNA
cacgcttcagggttg

SEQ ID NO: 11169 - DNA, 15 bp, synthetic construct
  source 1..15: mol_type = other DNA
cccaggtaatctgtc

SEQ ID NO: 11170 - DNA, 15 bp, synthetic construct
  source 1..15: mol_type = other DNA
cagttcctggatgac

SEQ ID NO: 11171 - DNA, 15 bp, synthetic construct
  source 1..15: mol_type = other DNA
tttagcccatcccag

SEQ ID NO: 11172 - DNA, 15 bp, synthetic construct
  source 1..15: mol_type = other DNA
ttcagtatgtacacg

SEQ ID NO: 11173 - DNA, 15 bp, synthetic construct
  source 1..15: mol_type = other DNA
tcatatttaaagcga

SEQ ID NO: 11174 - DNA, 15 bp, synthetic construct
  source 1..15: mol_type = other DNA
acgccatagtatgag

SEQ ID NO: 11175 - DNA, 15 bp, synthetic construct
  source 1..15: mol_type = other DNA
agaaggtatgaagtt

SEQ ID NO: 11176 - DNA, 15 bp, synthetic construct
  source 1..15: mol_type = other DNA
gaattcatggaggta

SEQ ID NO: 11177 - DNA, 15 bp, synthetic construct
  source 1..15: mol_type = other DNA
ttgattacagagatc

SEQ ID NO: 11178 - DNA, 15 bp, synthetic construct
  source 1..15: mol_type = other DNA
tttagcgctccaagg

SEQ ID NO: 11179 - DNA, 15 bp, synthetic construct
  source 1..15: mol_type = other DNA
gttggatttttccct

SEQ ID NO: 11180 - DNA, 15 bp, synthetic construct
  source 1..15: mol_type = other DNA
actaactgccaggtc

SEQ ID NO: 11181 - DNA, 15 bp, synthetic construct
  source 1..15: mol_type = other DNA
aacgtgtggagatca

SEQ ID NO: 11182 - DNA, 15 bp, synthetic construct
  source 1..15: mol_type = other DNA
gttctgttcgttgag

SEQ ID NO: 11183 - DNA, 15 bp, synthetic construct
  source 1..15: mol_type = other DNA
ttgactcttacggag

SEQ ID NO: 11184 - DNA, 15 bp, synthetic construct
  source 1..15: mol_type = other DNA
ggtctcaggatgttg

SEQ ID NO: 11185 - DNA, 15 bp, synthetic construct
  source 1..15: mol_type = other DNA
tcagcacacagaagc

SEQ ID NO: 11186 - DNA, 15 bp, synthetic construct
  source 1..15: mol_type = other DNA
acttagggccactgt

SEQ ID NO: 11187 - DNA, 15 bp, synthetic construct
  source 1..15: mol_type = other DNA
aaagtgctcagttat

SEQ ID NO: 11188 - DNA, 15 bp, synthetic construct
  source 1..15: mol_type = other DNA
tgcaaatccaactac

SEQ ID NO: 11189 - DNA, 15 bp, synthetic construct
  source 1..15: mol_type = other DNA
acaatagctgcagat

SEQ ID NO: 11190 - DNA, 15 bp, synthetic construct
  source 1..15: mol_type = other DNA
gaaatgtctcaggca

SEQ ID NO: 11191 - DNA, 15 bp, synthetic construct
  source 1..15: mol_type = other DNA
aagcatgatggttta

SEQ ID NO: 11192 - DNA, 15 bp, synthetic construct
  source 1..15: mol_type = other DNA
tcaaatttaataact

SEQ ID NO: 11193 - DNA, 15 bp, synthetic construct
  source 1..15: mol_type = other DNA
ttcttaacctcgctt

SEQ ID NO: 11194 - DNA, 15 bp, synthetic construct
  source 1..15: mol_type = other DNA
tttgaaatgtatcac

SEQ ID NO: 11195 - DNA, 15 bp, synthetic construct
  source 1..15: mol_type = other DNA
aattaagtcgagaag

SEQ ID NO: 11196 - DNA, 15 bp, synthetic construct
  source 1..15: mol_type = other DNA
ttcttaaacaacgtg

SEQ ID NO: 11197 - DNA, 15 bp, synthetic construct
  source 1..15: mol_type = other DNA
tctcccaagatccag

SEQ ID NO: 11198 - DNA, 15 bp, synthetic construct
  source 1..15: mol_type = other DNA
taccttgagctagag

SEQ ID NO: 11199 - DNA, 15 bp, synthetic construct
  source 1..15: mol_type = other DNA
tgtgtgctgacataa

SEQ ID NO: 11200 - DNA, 15 bp, synthetic construct
  source 1..15: mol_type = other DNA
tatatggatcagagg

SEQ ID NO: 11201 - DNA, 15 bp, synthetic construct
  source 1..15: mol_type = other DNA
gctaggttcccagtg

SEQ ID NO: 11202 - DNA, 15 bp, synthetic construct
  source 1..15: mol_type = other DNA
ctgacccaagatgaa

SEQ ID NO: 11203 - DNA, 15 bp, synthetic construct
  source 1..15: mol_type = other DNA
cccagtttctcaatg

SEQ ID NO: 11204 - DNA, 15 bp, synthetic construct
  source 1..15: mol_type = other DNA
attgttgtttctagt

SEQ ID NO: 11205 - DNA, 15 bp, synthetic construct
  source 1..15: mol_type = other DNA
taaaacactacgcat

SEQ ID NO: 11206 - DNA, 15 bp, synthetic construct
  source 1..15: mol_type = other DNA
cctattaaaactgac

SEQ ID NO: 11207 - DNA, 15 bp, synthetic construct
  source 1..15: mol_type = other DNA
gtattactggtgtgg

SEQ ID NO: 11208 - DNA, 15 bp, synthetic construct
  source 1..15: mol_type = other DNA
ggttttggcaacgtg

SEQ ID NO: 11209 - DNA, 15 bp, synthetic construct
  source 1..15: mol_type = other DNA
gaagaaaggtgaagt

SEQ ID NO: 11210 - DNA, 15 bp, synthetic construct
  source 1..15: mol_type = other DNA
taaacagggcatagc

SEQ ID NO: 11211 - DNA, 15 bp, synthetic construct
  source 1..15: mol_type = other DNA
tctcaacattgacgg

SEQ ID NO: 11212 - DNA, 15 bp, synthetic construct
  source 1..15: mol_type = other DNA
gcggtgttttgaaat

SEQ ID NO: 11213 - DNA, 15 bp, synthetic construct
  source 1..15: mol_type = other DNA
gcctgttttctttaa

SEQ ID NO: 11214 - DNA, 15 bp, synthetic construct
  source 1..15: mol_type = other DNA
ctatgtcatagttga

SEQ ID NO: 11215 - DNA, 15 bp, synthetic construct
  source 1..15: mol_type = other DNA
tcggaggttgccttt

SEQ ID NO: 11216 - DNA, 15 bp, synthetic construct
  source 1..15: mol_type = other DNA
gctgaattgcccaag

SEQ ID NO: 11217 - DNA, 15 bp, synthetic construct
  source 1..15: mol_type = other DNA
tcaaactgcagagta

SEQ ID NO: 11218 - DNA, 15 bp, synthetic construct
  source 1..15: mol_type = other DNA
tgcccatgagttaga

SEQ ID NO: 11219 - DNA, 15 bp, synthetic construct
  source 1..15: mol_type = other DNA
gccacaaaaggaact

SEQ ID NO: 11220 - DNA, 15 bp, synthetic construct
  source 1..15: mol_type = other DNA
tttccctcactacac

SEQ ID NO: 11221 - DNA, 15 bp, synthetic construct
  source 1..15: mol_type = other DNA
tcaaggagttatttt

SEQ ID NO: 11222 - DNA, 15 bp, synthetic construct
  source 1..15: mol_type = other DNA
agaggacccaaaatg

SEQ ID NO: 11223 - DNA, 15 bp, synthetic construct
  source 1..15: mol_type = other DNA
tactcacttatctct

SEQ ID NO: 11224 - DNA, 15 bp, synthetic construct
  source 1..15: mol_type = other DNA
ttcgatactctggct

SEQ ID NO: 11225 - DNA, 15 bp, synthetic construct
  source 1..15: mol_type = other DNA
cacagaagtcgatgg

SEQ ID NO: 11226 - DNA, 15 bp, synthetic construct
  source 1..15: mol_type = other DNA
taatcgcctgtatgg

SEQ ID NO: 11227 - DNA, 15 bp, synthetic construct
  source 1..15: mol_type = other DNA
attcggcacaggatg

SEQ ID NO: 11228 - DNA, 15 bp, synthetic construct
  source 1..15: mol_type = other DNA
gcttatctgttcctc

SEQ ID NO: 11229 - DNA, 15 bp, synthetic construct
  source 1..15: mol_type = other DNA
tatagcagtcaacca

SEQ ID NO: 11230 - DNA, 15 bp, synthetic construct
  source 1..15: mol_type = other DNA
atcattcctgtgtcg

SEQ ID NO: 11231 - DNA, 15 bp, synthetic construct
  source 1..15: mol_type = other DNA
tctatatccagcttt

SEQ ID NO: 11232 - DNA, 15 bp, synthetic construct
  source 1..15: mol_type = other DNA
tgctaagaccttcct

SEQ ID NO: 11233 - DNA, 15 bp, synthetic construct
  source 1..15: mol_type = other DNA
agaacactctctgct

SEQ ID NO: 11234 - DNA, 15 bp, synthetic construct
  source 1..15: mol_type = other DNA
aggtttacagtgatg

SEQ ID NO: 11235 - DNA, 15 bp, synthetic construct
  source 1..15: mol_type = other DNA
acgtgcttgatccac

SEQ ID NO: 11236 - DNA, 15 bp, synthetic construct
  source 1..15: mol_type = other DNA
ctcattctcccatcc

SEQ ID NO: 11237 - DNA, 15 bp, synthetic construct
  source 1..15: mol_type = other DNA
ttcaaacgagtcaag

SEQ ID NO: 11238 - DNA, 15 bp, synthetic construct
  source 1..15: mol_type = other DNA
agcacagtacttggt

SEQ ID NO: 11239 - DNA, 15 bp, synthetic construct
  source 1..15: mol_type = other DNA
gatgttctgaaagct

SEQ ID NO: 11240 - DNA, 15 bp, synthetic construct
  source 1..15: mol_type = other DNA
cagtatacattctaa

SEQ ID NO: 11241 - DNA, 15 bp, synthetic construct
  source 1..15: mol_type = other DNA
tgaccagtgacacga

SEQ ID NO: 11242 - DNA, 15 bp, synthetic construct
  source 1..15: mol_type = other DNA
gcggaagattttgtc

SEQ ID NO: 11243 - DNA, 15 bp, synthetic construct
  source 1..15: mol_type = other DNA
tactcttgttgttac

SEQ ID NO: 11244 - DNA, 15 bp, synthetic construct
  source 1..15: mol_type = other DNA
acctttttgctttgc

SEQ ID NO: 11245 - DNA, 15 bp, synthetic construct
  source 1..15: mol_type = other DNA
attagagatctcact

SEQ ID NO: 11246 - DNA, 15 bp, synthetic construct
  source 1..15: mol_type = other DNA
gttggactaaggatg

SEQ ID NO: 11247 - DNA, 15 bp, synthetic construct
  source 1..15: mol_type = other DNA
aagcactgtcctatt

SEQ ID NO: 11248 - DNA, 15 bp, synthetic construct
  source 1..15: mol_type = other DNA
ctttgttggacgttc

SEQ ID NO: 11249 - DNA, 15 bp, synthetic construct
  source 1..15: mol_type = other DNA
agggtagctgattct

SEQ ID NO: 11250 - DNA, 15 bp, synthetic construct
  source 1..15: mol_type = other DNA
gatgggattaacgtc

SEQ ID NO: 11251 - DNA, 15 bp, synthetic construct
  source 1..15: mol_type = other DNA
cgggatgagctaggc

SEQ ID NO: 11252 - DNA, 15 bp, synthetic construct
  source 1..15: mol_type = other DNA
aggtcctatgtccag

SEQ ID NO: 11253 - DNA, 15 bp, synthetic construct
  source 1..15: mol_type = other DNA
tcccctcctatccgt

SEQ ID NO: 11254 - DNA, 15 bp, synthetic construct
  source 1..15: mol_type = other DNA
acctgagctcaggct

SEQ ID NO: 11255 - DNA, 15 bp, synthetic construct
  source 1..15: mol_type = other DNA
gtttacctacaattg

SEQ ID NO: 11256 - DNA, 15 bp, synthetic construct
  source 1..15: mol_type = other DNA
agctacaagcagtac

SEQ ID NO: 11257 - DNA, 15 bp, synthetic construct
  source 1..15: mol_type = other DNA
gtttacctacaattg

SEQ ID NO: 11258 - DNA, 15 bp, synthetic construct
  source 1..15: mol_type = other DNA
ccatgacgacagtgc

SEQ ID NO: 11259 - DNA, 15 bp, synthetic construct
  source 1..15: mol_type = other DNA
gtgactacatcagcc

SEQ ID NO: 11260 - DNA, 15 bp, synthetic construct
  source 1..15: mol_type = other DNA
ccatgacgacagtgc

SEQ ID NO: 11261 - DNA, 15 bp, synthetic construct
  source 1..15: mol_type = other DNA
tctgaggtgcactag

SEQ ID NO: 11262 - DNA, 15 bp, synthetic construct
  source 1..15: mol_type = other DNA
tggaaggaccgtgac

SEQ ID NO: 11263 - DNA, 15 bp, synthetic construct
  source 1..15: mol_type = other DNA
cttagactgaggctg

SEQ ID NO: 11264 - DNA, 15 bp, synthetic construct
  source 1..15: mol_type = other DNA
cattggttagctctg

SEQ ID NO: 11265 - DNA, 15 bp, synthetic construct
  source 1..15: mol_type = other DNA
caaccccagccttgt

SEQ ID NO: 11266 - DNA, 15 bp, synthetic construct
  source 1..15: mol_type = other DNA
gcatcaagaacaagg

SEQ ID NO: 11267 - DNA, 15 bp, synthetic construct
  source 1..15: mol_type = other DNA
tcaacacccatccgc

SEQ ID NO: 11268 - DNA, 15 bp, synthetic construct
  source 1..15: mol_type = other DNA
tcgtagacactggag

SEQ ID NO: 11269 - DNA, 15 bp, synthetic construct
  source 1..15: mol_type = other DNA
tcaacacccatccgc

SEQ ID NO: 11270 - DNA, 15 bp, synthetic construct
  source 1..15: mol_type = other DNA
gcttgagactcctgt

SEQ ID NO: 11271 - DNA, 15 bp, synthetic construct
  source 1..15: mol_type = other DNA
ttggcatgatcttca

SEQ ID NO: 11272 - DNA, 15 bp, synthetic construct
  source 1..15: mol_type = other DNA
gcttgagactcctgt

SEQ ID NO: 11273 - DNA, 15 bp, synthetic construct
  source 1..15: mol_type = other DNA
tcatctggccctctt

SEQ ID NO: 11274 - DNA, 15 bp, synthetic construct
  source 1..15: mol_type = other DNA
atggtgatggcacag

SEQ ID NO: 11275 - DNA, 15 bp, synthetic construct
  source 1..15: mol_type = other DNA
atagtgttccttcat

SEQ ID NO: 11276 - DNA, 15 bp, synthetic construct
  source 1..15: mol_type = other DNA
gtatactaccaacct

SEQ ID NO: 11277 - DNA, 15 bp, synthetic construct
  source 1..15: mol_type = other DNA
cttttctttttgaga

SEQ ID NO: 11278 - DNA, 15 bp, synthetic construct
  source 1..15: mol_type = other DNA
cagctggtgttgtgg

SEQ ID NO: 11279 - DNA, 15 bp, synthetic construct
  source 1..15: mol_type = other DNA
gttgtgcatgctatt

SEQ ID NO: 11280 - DNA, 15 bp, synthetic construct
  source 1..15: mol_type = other DNA
tcgagaattgcttgt

SEQ ID NO: 11281 - DNA, 15 bp, synthetic construct
  source 1..15: mol_type = other DNA
tgtcattcatttctg

SEQ ID NO: 11282 - DNA, 15 bp, synthetic construct
  source 1..15: mol_type = other DNA
gagggaagtgcatga

SEQ ID NO: 11283 - DNA, 15 bp, synthetic construct
  source 1..15: mol_type = other DNA
tctctcttaccaatc

SEQ ID NO: 11284 - DNA, 15 bp, synthetic construct
  source 1..15: mol_type = other DNA
ttaacaaacctttga

SEQ ID NO: 11285 - DNA, 15 bp, synthetic construct
  source 1..15: mol_type = other DNA
ttcttgaggtggaga

SEQ ID NO: 11286 - DNA, 15 bp, synthetic construct
  source 1..15: mol_type = other DNA
aattttatagctatg

SEQ ID NO: 11287 - DNA, 15 bp, synthetic construct
  source 1..15: mol_type = other DNA
cccataagttctgtt

SEQ ID NO: 11288 - DNA, 15 bp, synthetic construct
  source 1..15: mol_type = other DNA
atgtggaaattaaac

SEQ ID NO: 11289 - DNA, 15 bp, synthetic construct
  source 1..15: mol_type = other DNA
gctactgagttctac

SEQ ID NO: 11290 - DNA, 15 bp, synthetic construct
  source 1..15: mol_type = other DNA
atatgctaagtcacg

SEQ ID NO: 11291 - DNA, 15 bp, synthetic construct
  source 1..15: mol_type = other DNA
tgttggttgttgggc

SEQ ID NO: 11292 - DNA, 15 bp, synthetic construct
  source 1..15: mol_type = other DNA
ccaactagactcaaa

SEQ ID NO: 11293 - DNA, 15 bp, synthetic construct
  source 1..15: mol_type = other DNA
tctctgttcagttct

SEQ ID NO: 11294 - DNA, 15 bp, synthetic construct
  source 1..15: mol_type = other DNA
taaaacataagaagc

SEQ ID NO: 11295 - DNA, 15 bp, synthetic construct
  source 1..15: mol_type = other DNA
ttacttatggttgct

SEQ ID NO: 11296 - DNA, 15 bp, synthetic construct
  source 1..15: mol_type = other DNA
ataaatgccaactga

SEQ ID NO: 11297 - DNA, 15 bp, synthetic construct
  source 1..15: mol_type = other DNA
ttcctgcctttgatt

SEQ ID NO: 11298 - DNA, 15 bp, synthetic construct
  source 1..15: mol_type = other DNA
aagtaaaactgtgga

SEQ ID NO: 11299 - DNA, 15 bp, synthetic construct
  source 1..15: mol_type = other DNA
tgtttgctctagggc

SEQ ID NO: 11300 - DNA, 15 bp, synthetic construct
  source 1..15: mol_type = other DNA
gacgatacataaggt

SEQ ID NO: 11301 - DNA, 15 bp, synthetic construct
  source 1..15: mol_type = other DNA
cagttttaccacttt

SEQ ID NO: 11302 - DNA, 15 bp, synthetic construct
  source 1..15: mol_type = other DNA
ttgctctcctttcag

SEQ ID NO: 11303 - DNA, 15 bp, synthetic construct
  source 1..15: mol_type = other DNA
ccaactggtggtatt

SEQ ID NO: 11304 - DNA, 15 bp, synthetic construct
  source 1..15: mol_type = other DNA
ggaggtaaataggag

SEQ ID NO: 11305 - DNA, 15 bp, synthetic construct
  source 1..15: mol_type = other DNA
cacttgggatctgtt

SEQ ID NO: 11306 - DNA, 15 bp, synthetic construct
  source 1..15: mol_type = other DNA
ccaagaatactgtgt

SEQ ID NO: 11307 - DNA, 15 bp, synthetic construct
  source 1..15: mol_type = other DNA
taccactgtttctga

SEQ ID NO: 11308 - DNA, 15 bp, synthetic construct
  source 1..15: mol_type = other DNA
tcttggatgaaatgg

SEQ ID NO: 11309 - DNA, 15 bp, synthetic construct
  source 1..15: mol_type = other DNA
atcaacaagagttag

SEQ ID NO: 11310 - DNA, 15 bp, synthetic construct
  source 1..15: mol_type = other DNA
aatgaagagagaaac

SEQ ID NO: 11311 - DNA, 15 bp, synthetic construct
  source 1..15: mol_type = other DNA
cattgtaaaatgctt

SEQ ID NO: 11312 - DNA, 15 bp, synthetic construct
  source 1..15: mol_type = other DNA
ttagagatactgaga

SEQ ID NO: 11313 - DNA, 15 bp, synthetic construct
  source 1..15: mol_type = other DNA
aagccgttctcttgc

SEQ ID NO: 11314 - DNA, 15 bp, synthetic construct
  source 1..15: mol_type = other DNA
aaaattagctgggta

SEQ ID NO: 11315 - DNA, 15 bp, synthetic construct
  source 1..15: mol_type = other DNA
ccaattttgtctgat

SEQ ID NO: 11316 - DNA, 15 bp, synthetic construct
  source 1..15: mol_type = other DNA
agatgacatgcaaac

SEQ ID NO: 11317 - DNA, 15 bp, synthetic construct
  source 1..15: mol_type = other DNA
gcttttaaggcagtc

SEQ ID NO: 11318 - DNA, 15 bp, synthetic construct
  source 1..15: mol_type = other DNA
aaagagcagagattg

SEQ ID NO: 11319 - DNA, 15 bp, synthetic construct
  source 1..15: mol_type = other DNA
tttcccccattttta

SEQ ID NO: 11320 - DNA, 15 bp, synthetic construct
  source 1..15: mol_type = other DNA
ttgtaacctccagat

SEQ ID NO: 11321 - DNA, 15 bp, synthetic construct
  source 1..15: mol_type = other DNA
attccacatatgttt

SEQ ID NO: 11322 - DNA, 15 bp, synthetic construct
  source 1..15: mol_type = other DNA
aacaggatgtgtaac

SEQ ID NO: 11323 - DNA, 15 bp, synthetic construct
  source 1..15: mol_type = other DNA
tagaaactgggctac

SEQ ID NO: 11324 - DNA, 15 bp, synthetic construct
  source 1..15: mol_type = other DNA
aggatttgctctctg

SEQ ID NO: 11325 - DNA, 15 bp, synthetic construct
  source 1..15: mol_type = other DNA
aagcctcccccaact

SEQ ID NO: 11326 - DNA, 15 bp, synthetic construct
  source 1..15: mol_type = other DNA
tagtggtccccaacc

SEQ ID NO: 11327 - DNA, 15 bp, synthetic construct
  source 1..15: mol_type = other DNA
ggtcaaatttgctta

SEQ ID NO: 11328 - DNA, 15 bp, synthetic construct
  source 1..15: mol_type = other DNA
aaaactcactagtgc

SEQ ID NO: 11329 - DNA, 15 bp, synthetic construct
  source 1..15: mol_type = other DNA
gaaatcgcgccctaa

SEQ ID NO: 11330 - DNA, 15 bp, synthetic construct
  source 1..15: mol_type = other DNA
atgagcaataaatag

SEQ ID NO: 11331 - DNA, 15 bp, synthetic construct
  source 1..15: mol_type = other DNA
ttctccctaaccagg

SEQ ID NO: 11332 - DNA, 15 bp, synthetic construct
  source 1..15: mol_type = other DNA
tgcagagaaggcata

SEQ ID NO: 11333 - DNA, 15 bp, synthetic construct
  source 1..15: mol_type = other DNA
tgattagtcagacat

SEQ ID NO: 11334 - DNA, 15 bp, synthetic construct
  source 1..15: mol_type = other DNA
ggctcaagatgttta

SEQ ID NO: 11335 - DNA, 15 bp, synthetic construct
  source 1..15: mol_type = other DNA
atctccagaattcct

SEQ ID NO: 11336 - DNA, 15 bp, synthetic construct
  source 1..15: mol_type = other DNA
agcgacagattaaga

SEQ ID NO: 11337 - DNA, 15 bp, synthetic construct
  source 1..15: mol_type = other DNA
cagatgagccttctt

SEQ ID NO: 11338 - DNA, 15 bp, synthetic construct
  source 1..15: mol_type = other DNA
ggttatgatttaacg

SEQ ID NO: 11339 - DNA, 15 bp, synthetic construct
  source 1..15: mol_type = other DNA
ttttcagggagtggt

SEQ ID NO: 11340 - DNA, 15 bp, synthetic construct
  source 1..15: mol_type = other DNA
agggaccacttctga

SEQ ID NO: 11341 - DNA, 15 bp, synthetic construct
  source 1..15: mol_type = other DNA
aaccagtttcagtgt

SEQ ID NO: 11342 - DNA, 15 bp, synthetic construct
  source 1..15: mol_type = other DNA
agagcaaacacacac

SEQ ID NO: 11343 - DNA, 15 bp, synthetic construct
  source 1..15: mol_type = other DNA
tccttagtgtgactg

SEQ ID NO: 11344 - DNA, 15 bp, synthetic construct
  source 1..15: mol_type = other DNA
tgcaagcataagaga

SEQ ID NO: 11345 - DNA, 15 bp, synthetic construct
  source 1..15: mol_type = other DNA
gcctccactatagct

SEQ ID NO: 11346 - DNA, 15 bp, synthetic construct
  source 1..15: mol_type = other DNA
cacatgtcagaaata

SEQ ID NO: 11347 - DNA, 15 bp, synthetic construct
  source 1..15: mol_type = other DNA
tacaatattgtgttt

SEQ ID NO: 11348 - DNA, 15 bp, synthetic construct
  source 1..15: mol_type = other DNA
tttatgacttgagat

SEQ ID NO: 11349 - DNA, 15 bp, synthetic construct
  source 1..15: mol_type = other DNA
tgttaaaagactact

SEQ ID NO: 11350 - DNA, 15 bp, synthetic construct
  source 1..15: mol_type = other DNA
aagaattcagtggga

SEQ ID NO: 11351 - DNA, 15 bp, synthetic construct
  source 1..15: mol_type = other DNA
ggcaggcctgagtct

SEQ ID NO: 11352 - DNA, 15 bp, synthetic construct
  source 1..15: mol_type = other DNA
acaatctaaaatcat

SEQ ID NO: 11353 - DNA, 15 bp, synthetic construct
  source 1..15: mol_type = other DNA
cacaggatgtatagt

SEQ ID NO: 11354 - DNA, 15 bp, synthetic construct
  source 1..15: mol_type = other DNA
aattaaagaagactt

SEQ ID NO: 11355 - DNA, 15 bp, synthetic construct
  source 1..15: mol_type = other DNA
cctggtatatagagg

SEQ ID NO: 11356 - DNA, 15 bp, synthetic construct
  source 1..15: mol_type = other DNA
ttcaacatttatttt

SEQ ID NO: 11357 - DNA, 15 bp, synthetic construct
  source 1..15: mol_type = other DNA
tgctattcatttacc

SEQ ID NO: 11358 - DNA, 15 bp, synthetic construct
  source 1..15: mol_type = other DNA
tattgaacaatgtac

SEQ ID NO: 11359 - DNA, 15 bp, synthetic construct
  source 1..15: mol_type = other DNA
gaaatttttcagttt

SEQ ID NO: 11360 - DNA, 15 bp, synthetic construct
  source 1..15: mol_type = other DNA
taaaaacatggaact

SEQ ID NO: 11361 - DNA, 15 bp, synthetic construct
  source 1..15: mol_type = other DNA
ctgagtgaattgaaa

SEQ ID NO: 11362 - DNA, 15 bp, synthetic construct
  source 1..15: mol_type = other DNA
cagtacaagagtatc

SEQ ID NO: 11363 - DNA, 15 bp, synthetic construct
  source 1..15: mol_type = other DNA
gataaattccatgtg

SEQ ID NO: 11364 - DNA, 15 bp, synthetic construct
  source 1..15: mol_type = other DNA
accacaagaaaagac

SEQ ID NO: 11365 - DNA, 15 bp, synthetic construct
  source 1..15: mol_type = other DNA
aatccatgtaatact

SEQ ID NO: 11366 - DNA, 15 bp, synthetic construct
  source 1..15: mol_type = other DNA
tgaagaattcacacc

SEQ ID NO: 11367 - DNA, 15 bp, synthetic construct
  source 1..15: mol_type = other DNA
tttctgttttggtct

SEQ ID NO: 11368 - DNA, 15 bp, synthetic construct
  source 1..15: mol_type = other DNA
tggacgaattcacaa

SEQ ID NO: 11369 - DNA, 15 bp, synthetic construct
  source 1..15: mol_type = other DNA
ttagatatgtgcaac

SEQ ID NO: 11370 - DNA, 15 bp, synthetic construct
  source 1..15: mol_type = other DNA
actagaatgactaat

SEQ ID NO: 11371 - DNA, 15 bp, synthetic construct
  source 1..15: mol_type = other DNA
tttctctggttacgt

SEQ ID NO: 11372 - DNA, 15 bp, synthetic construct
  source 1..15: mol_type = other DNA
aagaagaaggatcca

SEQ ID NO: 11373 - DNA, 15 bp, synthetic construct
  source 1..15: mol_type = other DNA
ctttgacacaataat

SEQ ID NO: 11374 - DNA, 15 bp, synthetic construct
  source 1..15: mol_type = other DNA
ataaaactacacact

SEQ ID NO: 11375 - DNA, 15 bp, synthetic construct
  source 1..15: mol_type = other DNA
tccctcctagggaat

SEQ ID NO: 11376 - DNA, 15 bp, synthetic construct
  source 1..15: mol_type = other DNA
atatggacactccac

SEQ ID NO: 11377 - DNA, 15 bp, synthetic construct
  source 1..15: mol_type = other DNA
ttcttattgggcttc

SEQ ID NO: 11378 - DNA, 15 bp, synthetic construct
  source 1..15: mol_type = other DNA
acatattaatttgca

SEQ ID NO: 11379 - DNA, 15 bp, synthetic construct
  source 1..15: mol_type = other DNA
ttccaaatgcaatat

SEQ ID NO: 11380 - DNA, 15 bp, synthetic construct
  source 1..15: mol_type = other DNA
agatctcatgtagaa

SEQ ID NO: 11381 - DNA, 15 bp, synthetic construct
  source 1..15: mol_type = other DNA
atggtaaccactagt

SEQ ID NO: 11382 - DNA, 15 bp, synthetic construct
  source 1..15: mol_type = other DNA
ttaaataagccatat

SEQ ID NO: 11383 - DNA, 15 bp, synthetic construct
  source 1..15: mol_type = other DNA
cacaccacagtttag

SEQ ID NO: 11384 - DNA, 15 bp, synthetic construct
  source 1..15: mol_type = other DNA
atgagtcacgatatg

SEQ ID NO: 11385 - DNA, 15 bp, synthetic construct
  source 1..15: mol_type = other DNA
ttatgactgcaccaa

SEQ ID NO: 11386 - DNA, 15 bp, synthetic construct
  source 1..15: mol_type = other DNA
aactcttgtacagtg

SEQ ID NO: 11387 - DNA, 15 bp, synthetic construct
  source 1..15: mol_type = other DNA
gttccactgcccatt

SEQ ID NO: 11388 - DNA, 15 bp, synthetic construct
  source 1..15: mol_type = other DNA
agaaaatagataacc

SEQ ID NO: 11389 - DNA, 15 bp, synthetic construct
  source 1..15: mol_type = other DNA
ttttcttctagtcca

SEQ ID NO: 11390 - DNA, 15 bp, synthetic construct
  source 1..15: mol_type = other DNA
ctctggcagtgattt

SEQ ID NO: 11391 - DNA, 15 bp, synthetic construct
  source 1..15: mol_type = other DNA
ttctggttgtgggtt

SEQ ID NO: 11392 - DNA, 15 bp, synthetic construct
  source 1..15: mol_type = other DNA
tacatagaaataaac

SEQ ID NO: 11393 - DNA, 15 bp, synthetic construct
  source 1..15: mol_type = other DNA
atcaaatcttttggc

SEQ ID NO: 11394 - DNA, 15 bp, synthetic construct
  source 1..15: mol_type = other DNA
atgtaagcccaggat

SEQ ID NO: 11395 - DNA, 15 bp, synthetic construct
  source 1..15: mol_type = other DNA
tgggtttcctaacgt

SEQ ID NO: 11396 - DNA, 15 bp, synthetic construct
  source 1..15: mol_type = other DNA
agatagtctctctca

SEQ ID NO: 11397 - DNA, 15 bp, synthetic construct
  source 1..15: mol_type = other DNA
ctgtttgatcaatag

SEQ ID NO: 11398 - DNA, 15 bp, synthetic construct
  source 1..15: mol_type = other DNA
cttaagtagccaacg

SEQ ID NO: 11399 - DNA, 15 bp, synthetic construct
  source 1..15: mol_type = other DNA
tagggattttattca

SEQ ID NO: 11400 - DNA, 15 bp, synthetic construct
  source 1..15: mol_type = other DNA
ctcatgaatctgaat

SEQ ID NO: 11401 - DNA, 15 bp, synthetic construct
  source 1..15: mol_type = other DNA
aggtctttcatcttt

SEQ ID NO: 11402 - DNA, 15 bp, synthetic construct
  source 1..15: mol_type = other DNA
aatgacctggccaaa

SEQ ID NO: 11403 - DNA, 15 bp, synthetic construct
  source 1..15: mol_type = other DNA
aacaggttgctttgt

SEQ ID NO: 11404 - DNA, 15 bp, synthetic construct
  source 1..15: mol_type = other DNA
atagaaaaccccgaa

SEQ ID NO: 11405 - DNA, 15 bp, synthetic construct
  source 1..15: mol_type = other DNA
tagaagggcttctgt

SEQ ID NO: 11406 - DNA, 15 bp, synthetic construct
  source 1..15: mol_type = other DNA
gttataatcaatgag

SEQ ID NO: 11407 - DNA, 15 bp, synthetic construct
  source 1..15: mol_type = other DNA
tcacattgattgcta

SEQ ID NO: 11408 - DNA, 15 bp, synthetic construct
  source 1..15: mol_type = other DNA
atttctggcatgcaa

SEQ ID NO: 11409 - DNA, 15 bp, synthetic construct
  source 1..15: mol_type = other DNA
tgtgatgcctttggc

SEQ ID NO: 11410 - DNA, 15 bp, synthetic construct
  source 1..15: mol_type = other DNA
ggaatacttcctaac

SEQ ID NO: 11411 - DNA, 15 bp, synthetic construct
  source 1..15: mol_type = other DNA
tgtttgaggttttgg

SEQ ID NO: 11412 - DNA, 15 bp, synthetic construct
  source 1..15: mol_type = other DNA
cctctaaatcaaaaa

SEQ ID NO: 11413 - DNA, 15 bp, synthetic construct
  source 1..15: mol_type = other DNA
tggagtgtggataag

SEQ ID NO: 11414 - DNA, 15 bp, synthetic construct
  source 1..15: mol_type = other DNA
ataaagatgatcagt

SEQ ID NO: 11415 - DNA, 15 bp, synthetic construct
  source 1..15: mol_type = other DNA
cctggccgaattcat

SEQ ID NO: 11416 - DNA, 15 bp, synthetic construct
  source 1..15: mol_type = other DNA
acttacgtcctttgc

SEQ ID NO: 11417 - DNA, 15 bp, synthetic construct
  source 1..15: mol_type = other DNA
tctgttttcagttat

SEQ ID NO: 11418 - DNA, 15 bp, synthetic construct
  source 1..15: mol_type = other DNA
cagtttggagttttc

SEQ ID NO: 11419 - DNA, 15 bp, synthetic construct
  source 1..15: mol_type = other DNA
gatggtctcgaatac

SEQ ID NO: 11420 - DNA, 15 bp, synthetic construct
  source 1..15: mol_type = other DNA
accataatgggatgc

SEQ ID NO: 11421 - DNA, 15 bp, synthetic construct
  source 1..15: mol_type = other DNA
atgtatgttcctgtc

SEQ ID NO: 11422 - DNA, 15 bp, synthetic construct
  source 1..15: mol_type = other DNA
aggaatagaaagcct

SEQ ID NO: 11423 - DNA, 15 bp, synthetic construct
  source 1..15: mol_type = other DNA
ttagtttaccactgt

SEQ ID NO: 11424 - DNA, 15 bp, synthetic construct
  source 1..15: mol_type = other DNA
taagaaagaggacaa

SEQ ID NO: 11425 - DNA, 15 bp, synthetic construct
  source 1..15: mol_type = other DNA
ccaatttgttgggat

SEQ ID NO: 11426 - DNA, 15 bp, synthetic construct
  source 1..15: mol_type = other DNA
ggaaataataaagat

SEQ ID NO: 11427 - DNA, 15 bp, synthetic construct
  source 1..15: mol_type = other DNA
cttgtctctgttctg

SEQ ID NO: 11428 - DNA, 15 bp, synthetic construct
  source 1..15: mol_type = other DNA
gcaataaatgccttg

SEQ ID NO: 11429 - DNA, 15 bp, synthetic construct
  source 1..15: mol_type = other DNA
acaattttgggctat

SEQ ID NO: 11430 - DNA, 15 bp, synthetic construct
  source 1..15: mol_type = other DNA
tggagtgagaaagac

SEQ ID NO: 11431 - DNA, 15 bp, synthetic construct
  source 1..15: mol_type = other DNA
gcatgttttgctttt

SEQ ID NO: 11432 - DNA, 15 bp, synthetic construct
  source 1..15: mol_type = other DNA
atactgagaaaatgg

SEQ ID NO: 11433 - DNA, 15 bp, synthetic construct
  source 1..15: mol_type = other DNA
taggttactatttgt

SEQ ID NO: 11434 - DNA, 15 bp, synthetic construct
  source 1..15: mol_type = other DNA
atgttgtatttaaaa

SEQ ID NO: 11435 - DNA, 15 bp, synthetic construct
  source 1..15: mol_type = other DNA
cattttgtgcctttt

SEQ ID NO: 11436 - DNA, 15 bp, synthetic construct
  source 1..15: mol_type = other DNA
tgggaaaagctctgt

SEQ ID NO: 11437 - DNA, 15 bp, synthetic construct
  source 1..15: mol_type = other DNA
agcagttttagggtt

SEQ ID NO: 11438 - DNA, 15 bp, synthetic construct
  source 1..15: mol_type = other DNA
atatcaacatgttac

SEQ ID NO: 11439 - DNA, 15 bp, synthetic construct
  source 1..15: mol_type = other DNA
tctgtgggtttctac

SEQ ID NO: 11440 - DNA, 15 bp, synthetic construct
  source 1..15: mol_type = other DNA
aggcacatctttacc

SEQ ID NO: 11441 - DNA, 15 bp, synthetic construct
  source 1..15: mol_type = other DNA
cactttctttccctc

SEQ ID NO: 11442 - DNA, 15 bp, synthetic construct
  source 1..15: mol_type = other DNA
gcatattagtccgtt

SEQ ID NO: 11443 - DNA, 15 bp, synthetic construct
  source 1..15: mol_type = other DNA
tctgaggcctgccag

SEQ ID NO: 11444 - DNA, 15 bp, synthetic construct
  source 1..15: mol_type = other DNA
ggttgaataggcagt

SEQ ID NO: 11445 - DNA, 15 bp, synthetic construct
  source 1..15: mol_type = other DNA
ttcactgccctaaaa

SEQ ID NO: 11446 - DNA, 15 bp, synthetic construct
  source 1..15: mol_type = other DNA
ggaggtaattaaaaa

SEQ ID NO: 11447 - DNA, 15 bp, synthetic construct
  source 1..15: mol_type = other DNA
attgccttttctaaa

SEQ ID NO: 11448 - DNA, 15 bp, synthetic construct
  source 1..15: mol_type = other DNA
gaagctttatttgtg

SEQ ID NO: 11449 - DNA, 15 bp, synthetic construct
  source 1..15: mol_type = other DNA
gcttccaatttcaac

SEQ ID NO: 11450 - DNA, 15 bp, synthetic construct
  source 1..15: mol_type = other DNA
aaagaattaaaaatg

SEQ ID NO: 11451 - DNA, 15 bp, synthetic construct
  source 1..15: mol_type = other DNA
aattgatggatccta

SEQ ID NO: 11452 - DNA, 15 bp, synthetic construct
  source 1..15: mol_type = other DNA
acaagaaatgtgata

SEQ ID NO: 11453 - DNA, 15 bp, synthetic construct
  source 1..15: mol_type = other DNA
ccattctaataagcg

SEQ ID NO: 11454 - DNA, 30 bp, synthetic construct
  source 1..30: mol_type = other DNA
ccattctaataagcgacaatacttgtaaaa

SEQ ID NO: 11455 - DNA, 15 bp, synthetic construct
  source 1..15: mol_type = other DNA
tttggatgagtcctt

SEQ ID NO: 11456 - DNA, 15 bp, synthetic construct
  source 1..15: mol_type = other DNA
atagaaatcccagaa

SEQ ID NO: 11457 - DNA, 15 bp, synthetic construct
  source 1..15: mol_type = other DNA
ccaaactaaagatca

SEQ ID NO: 11458 - DNA, 15 bp, synthetic construct
  source 1..15: mol_type = other DNA
tatggagatggatga

SEQ ID NO: 11459 - DNA, 15 bp, synthetic construct
  source 1..15: mol_type = other DNA
tcacaatgctgtgca

SEQ ID NO: 11460 - DNA, 15 bp, synthetic construct
  source 1..15: mol_type = other DNA
tgttaaatgaaatac

SEQ ID NO: 11461 - DNA, 15 bp, synthetic construct
  source 1..15: mol_type = other DNA
ttgactattctacat

SEQ ID NO: 11462 - DNA, 15 bp, synthetic construct
  source 1..15: mol_type = other DNA
acgattgtagtggca

SEQ ID NO: 11463 - DNA, 15 bp, synthetic construct
  source 1..15: mol_type = other DNA
attgatgttttaact

SEQ ID NO: 11464 - DNA, 15 bp, synthetic construct
  source 1..15: mol_type = other DNA
cagaaaataaccact

SEQ ID NO: 11465 - DNA, 15 bp, synthetic construct
  source 1..15: mol_type = other DNA
tctccatgtcccttc

SEQ ID NO: 11466 - DNA, 15 bp, synthetic construct
  source 1..15: mol_type = other DNA
accttacatacactc

SEQ ID NO: 11467 - DNA, 15 bp, synthetic construct
  source 1..15: mol_type = other DNA
gatactagagatggg

SEQ ID NO: 11468 - DNA, 15 bp, synthetic construct
  source 1..15: mol_type = other DNA
agacgtatctccaaa

SEQ ID NO: 11469 - DNA, 15 bp, synthetic construct
  source 1..15: mol_type = other DNA
tctcctgcctcccga

SEQ ID NO: 11470 - DNA, 15 bp, synthetic construct
  source 1..15: mol_type = other DNA
agattatacagagaa

SEQ ID NO: 11471 - DNA, 15 bp, synthetic construct
  source 1..15: mol_type = other DNA
tcaggtgcattgttt

SEQ ID NO: 11472 - DNA, 15 bp, synthetic construct
  source 1..15: mol_type = other DNA
gtgcttcttgtatgc

SEQ ID NO: 11473 - DNA, 15 bp, synthetic construct
  source 1..15: mol_type = other DNA
tgcaagtacaattta

SEQ ID NO: 11474 - DNA, 15 bp, synthetic construct
  source 1..15: mol_type = other DNA
gaagttgagatcctt

SEQ ID NO: 11475 - DNA, 15 bp, synthetic construct
  source 1..15: mol_type = other DNA
acttcattctctttt

SEQ ID NO: 11476 - DNA, 15 bp, synthetic construct
  source 1..15: mol_type = other DNA
gtagagaccaatgga

SEQ ID NO: 11477 - DNA, 15 bp, synthetic construct
  source 1..15: mol_type = other DNA
gtatacaagggttta

SEQ ID NO: 11478 - DNA, 15 bp, synthetic construct
  source 1..15: mol_type = other DNA
ttctattcccagcta

SEQ ID NO: 11479 - DNA, 15 bp, synthetic construct
  source 1..15: mol_type = other DNA
actgccacctcaatc

SEQ ID NO: 11480 - DNA, 15 bp, synthetic construct
  source 1..15: mol_type = other DNA
acactttctgatttg

SEQ ID NO: 11481 - DNA, 15 bp, synthetic construct
  source 1..15: mol_type = other DNA
gcctgtagtaagttt

SEQ ID NO: 11482 - DNA, 15 bp, synthetic construct
  source 1..15: mol_type = other DNA
ccaatattgttaagg

SEQ ID NO: 11483 - DNA, 15 bp, synthetic construct
  source 1..15: mol_type = other DNA
tgcaaataacatcat

SEQ ID NO: 11484 - DNA, 15 bp, synthetic construct
  source 1..15: mol_type = other DNA
ccaactttaccaagg

SEQ ID NO: 11485 - DNA, 15 bp, synthetic construct
  source 1..15: mol_type = other DNA
atttctttcagcatt

SEQ ID NO: 11486 - DNA, 15 bp, synthetic construct
  source 1..15: mol_type = other DNA
gtattctgaccacac

SEQ ID NO: 11487 - DNA, 15 bp, synthetic construct
  source 1..15: mol_type = other DNA
aatgattactacaat

SEQ ID NO: 11488 - DNA, 15 bp, synthetic construct
  source 1..15: mol_type = other DNA
gaaatgttgaagggt

SEQ ID NO: 11489 - DNA, 15 bp, synthetic construct
  source 1..15: mol_type = other DNA
ctgataactctatgt

SEQ ID NO: 11490 - DNA, 15 bp, synthetic construct
  source 1..15: mol_type = other DNA
caggaaatcatgcaa

SEQ ID NO: 11491 - DNA, 15 bp, synthetic construct
  source 1..15: mol_type = other DNA
aactgggatagtgca

SEQ ID NO: 11492 - DNA, 15 bp, synthetic construct
  source 1..15: mol_type = other DNA
tatcaccaaattccc

SEQ ID NO: 11493 - DNA, 15 bp, synthetic construct
  source 1..15: mol_type = other DNA
gtatatgtatgtgat

SEQ ID NO: 11494 - DNA, 15 bp, synthetic construct
  source 1..15: mol_type = other DNA
ttagctgggcatggg

SEQ ID NO: 11495 - DNA, 15 bp, synthetic construct
  source 1..15: mol_type = other DNA
ttcctttctttttga

SEQ ID NO: 11496 - DNA, 15 bp, synthetic construct
  source 1..15: mol_type = other DNA
aggatagcttgaaca

SEQ ID NO: 11497 - DNA, 15 bp, synthetic construct
  source 1..15: mol_type = other DNA
tcactatgtttccta

SEQ ID NO: 11498 - DNA, 15 bp, synthetic construct
  source 1..15: mol_type = other DNA
tgctatatgatccag

SEQ ID NO: 11499 - DNA, 15 bp, synthetic construct
  source 1..15: mol_type = other DNA
cggaactgagactgc

SEQ ID NO: 11500 - DNA, 15 bp, synthetic construct
  source 1..15: mol_type = other DNA
tgcttaacatcactt

SEQ ID NO: 11501 - DNA, 15 bp, synthetic construct
  source 1..15: mol_type = other DNA
tcagtgtggttttca

SEQ ID NO: 11502 - DNA, 15 bp, synthetic construct
  source 1..15: mol_type = other DNA
aaaaggcagcacatg

SEQ ID NO: 11503 - DNA, 15 bp, synthetic construct
  source 1..15: mol_type = other DNA
tggaaatattttctc

SEQ ID NO: 11504 - DNA, 15 bp, synthetic construct
  source 1..15: mol_type = other DNA
gaaaccataaaacct

SEQ ID NO: 11505 - DNA, 15 bp, synthetic construct
  source 1..15: mol_type = other DNA
aaaccaatggcaagg

SEQ ID NO: 11506 - DNA, 15 bp, synthetic construct
  source 1..15: mol_type = other DNA
cagaatagaaagcat

SEQ ID NO: 11507 - DNA, 15 bp, synthetic construct
  source 1..15: mol_type = other DNA
agtgccatttattca

SEQ ID NO: 11508 - DNA, 15 bp, synthetic construct
  source 1..15: mol_type = other DNA
ttaaagatctaaagc

SEQ ID NO: 11509 - DNA, 15 bp, synthetic construct
  source 1..15: mol_type = other DNA
ttcactttgttctta

SEQ ID NO: 11510 - DNA, 15 bp, synthetic construct
  source 1..15: mol_type = other DNA
tgttcatagatcaat

SEQ ID NO: 11511 - DNA, 15 bp, synthetic construct
  source 1..15: mol_type = other DNA
tatagctatttcggc

SEQ ID NO: 11512 - DNA, 15 bp, synthetic construct
  source 1..15: mol_type = other DNA
tgacttcatttggat

SEQ ID NO: 11513 - DNA, 15 bp, synthetic construct
  source 1..15: mol_type = other DNA
gttatgcagtccaat

SEQ ID NO: 11514 - DNA, 15 bp, synthetic construct
  source 1..15: mol_type = other DNA
tcctcacgtgagaga

SEQ ID NO: 11515 - DNA, 15 bp, synthetic construct
  source 1..15: mol_type = other DNA
agtttttgccccatg

SEQ ID NO: 11516 - DNA, 15 bp, synthetic construct
  source 1..15: mol_type = other DNA
aatagagagctccca

SEQ ID NO: 11517 - DNA, 15 bp, synthetic construct
  source 1..15: mol_type = other DNA
aatcatgcgttcata

SEQ ID NO: 11518 - DNA, 15 bp, synthetic construct
  source 1..15: mol_type = other DNA
gacatcatatatgta

SEQ ID NO: 11519 - DNA, 15 bp, synthetic construct
  source 1..15: mol_type = other DNA
tgacttctgaatgct

SEQ ID NO: 11520 - DNA, 15 bp, synthetic construct
  source 1..15: mol_type = other DNA
aagatattctcacca

SEQ ID NO: 11521 - DNA, 15 bp, synthetic construct
  source 1..15: mol_type = other DNA
tcttgcccaattcct

SEQ ID NO: 11522 - DNA, 15 bp, synthetic construct
  source 1..15: mol_type = other DNA
aataatgcagttcac

SEQ ID NO: 11523 - DNA, 15 bp, synthetic construct
  source 1..15: mol_type = other DNA
tcagcttttcagcat

SEQ ID NO: 11524 - DNA, 15 bp, synthetic construct
  source 1..15: mol_type = other DNA
atttatccttagtac

SEQ ID NO: 11525 - DNA, 15 bp, synthetic construct
  source 1..15: mol_type = other DNA
tatgtacacttaact

SEQ ID NO: 11526 - DNA, 15 bp, synthetic construct
  source 1..15: mol_type = other DNA
caatcccaacttatt

SEQ ID NO: 11527 - DNA, 15 bp, synthetic construct
  source 1..15: mol_type = other DNA
tagtatgagggcaat

SEQ ID NO: 11528 - DNA, 15 bp, synthetic construct
  source 1..15: mol_type = other DNA
agaatactctaatag

SEQ ID NO: 11529 - DNA, 15 bp, synthetic construct
  source 1..15: mol_type = other DNA
atgaaaacaatagta

SEQ ID NO: 11530 - DNA, 15 bp, synthetic construct
  source 1..15: mol_type = other DNA
aaaagttgaaggagt

SEQ ID NO: 11531 - DNA, 15 bp, synthetic construct
  source 1..15: mol_type = other DNA
tgtaaggcaagagta

SEQ ID NO: 11532 - DNA, 15 bp, synthetic construct
  source 1..15: mol_type = other DNA
tgaaagcggcaagat

SEQ ID NO: 11533 - DNA, 15 bp, synthetic construct
  source 1..15: mol_type = other DNA
cagatgtaagaactt

SEQ ID NO: 11534 - DNA, 15 bp, synthetic construct
  source 1..15: mol_type = other DNA
tgttcacacaggatt

SEQ ID NO: 11535 - DNA, 15 bp, synthetic construct
  source 1..15: mol_type = other DNA
acctctctactttcc

SEQ ID NO: 11536 - DNA, 15 bp, synthetic construct
  source 1..15: mol_type = other DNA
tgaagaatatagtgc

SEQ ID NO: 11537 - DNA, 15 bp, synthetic construct
  source 1..15: mol_type = other DNA
gctttctatttcact

SEQ ID NO: 11538 - DNA, 15 bp, synthetic construct
  source 1..15: mol_type = other DNA
catagcacccacctg

SEQ ID NO: 11539 - DNA, 15 bp, synthetic construct
  source 1..15: mol_type = other DNA
gtccctgaaaattat

SEQ ID NO: 11540 - DNA, 15 bp, synthetic construct
  source 1..15: mol_type = other DNA
tatttacacgacagc

SEQ ID NO: 11541 - DNA, 15 bp, synthetic construct
  source 1..15: mol_type = other DNA
ttggtggccaaggct

SEQ ID NO: 11542 - DNA, 15 bp, synthetic construct
  source 1..15: mol_type = other DNA
ggcacacgctgctat

SEQ ID NO: 11543 - DNA, 15 bp, synthetic construct
  source 1..15: mol_type = other DNA
tagccaggcatagca

SEQ ID NO: 11544 - DNA, 15 bp, synthetic construct
  source 1..15: mol_type = other DNA
cctgaaaactcacca

SEQ ID NO: 11545 - DNA, 15 bp, synthetic construct
  source 1..15: mol_type = other DNA
tgtactgacttacta

SEQ ID NO: 11546 - DNA, 15 bp, synthetic construct
  source 1..15: mol_type = other DNA
gaaaagactaagagc

SEQ ID NO: 11547 - DNA, 15 bp, synthetic construct
  source 1..15: mol_type = other DNA
tgcgcatcttgcttt

SEQ ID NO: 11548 - DNA, 15 bp, synthetic construct
  source 1..15: mol_type = other DNA
ttttgactgctcaca

SEQ ID NO: 11549 - DNA, 15 bp, synthetic construct
  source 1..15: mol_type = other DNA
gggtttttcttctag

SEQ ID NO: 11550 - DNA, 15 bp, synthetic construct
  source 1..15: mol_type = other DNA
tgaacttggataata

SEQ ID NO: 11551 - DNA, 15 bp, synthetic construct
  source 1..15: mol_type = other DNA
gtgcctaatttcatt

SEQ ID NO: 11552 - DNA, 15 bp, synthetic construct
  source 1..15: mol_type = other DNA
accgggtattgactc

SEQ ID NO: 11553 - DNA, 15 bp, synthetic construct
  source 1..15: mol_type = other DNA
ctttctctgcatctg

SEQ ID NO: 11554 - DNA, 15 bp, synthetic construct
  source 1..15: mol_type = other DNA
ggaaaatactgtggt

SEQ ID NO: 11555 - DNA, 15 bp, synthetic construct
  source 1..15: mol_type = other DNA
ctgtatgatagtcta

SEQ ID NO: 11556 - DNA, 15 bp, synthetic construct
  source 1..15: mol_type = other DNA
caactggccaacagg

SEQ ID NO: 11557 - DNA, 15 bp, synthetic construct
  source 1..15: mol_type = other DNA
gtgatgagagatgtt

SEQ ID NO: 11558 - DNA, 15 bp, synthetic construct
  source 1..15: mol_type = other DNA
aactaaaaacctaca

SEQ ID NO: 11559 - DNA, 15 bp, synthetic construct
  source 1..15: mol_type = other DNA
tctcccattctacag

SEQ ID NO: 11560 - DNA, 15 bp, synthetic construct
  source 1..15: mol_type = other DNA
atgagacctgaagca

SEQ ID NO: 11561 - DNA, 15 bp, synthetic construct
  source 1..15: mol_type = other DNA
ttcttctagtactgt

SEQ ID NO: 11562 - DNA, 15 bp, synthetic construct
  source 1..15: mol_type = other DNA
caccatgttgaacac

SEQ ID NO: 11563 - DNA, 15 bp, synthetic construct
  source 1..15: mol_type = other DNA
tgttttcccaacatg

SEQ ID NO: 11564 - DNA, 15 bp, synthetic construct
  source 1..15: mol_type = other DNA
ttgaatatacatggc

SEQ ID NO: 11565 - DNA, 15 bp, synthetic construct
  source 1..15: mol_type = other DNA
tttggttaccattgt

SEQ ID NO: 11566 - DNA, 15 bp, synthetic construct
  source 1..15: mol_type = other DNA
atcaaaatacagtcg

SEQ ID NO: 11567 - DNA, 15 bp, synthetic construct
  source 1..15: mol_type = other DNA
gcgcatatacaaaat

SEQ ID NO: 11568 - DNA, 15 bp, synthetic construct
  source 1..15: mol_type = other DNA
aaaaacacaatcctt

SEQ ID NO: 11569 - DNA, 15 bp, synthetic construct
  source 1..15: mol_type = other DNA
tcagtattgtttgtc

SEQ ID NO: 11570 - DNA, 15 bp, synthetic construct
  source 1..15: mol_type = other DNA
ctaaggtaaatgaca

SEQ ID NO: 11571 - DNA, 15 bp, synthetic construct
  source 1..15: mol_type = other DNA
gtgtgctgcactgat

SEQ ID NO: 11572 - DNA, 15 bp, synthetic construct
  source 1..15: mol_type = other DNA
aactatagcaagaat

SEQ ID NO: 11573 - DNA, 15 bp, synthetic construct
  source 1..15: mol_type = other DNA
tgatactgattctcc

SEQ ID NO: 11574 - DNA, 15 bp, synthetic construct
  source 1..15: mol_type = other DNA
tcaatgtgcaaaaca

SEQ ID NO: 11575 - DNA, 15 bp, synthetic construct
  source 1..15: mol_type = other DNA
ttagtcttgctagag

SEQ ID NO: 11576 - DNA, 15 bp, synthetic construct
  source 1..15: mol_type = other DNA
aatctaaaattgatg

SEQ ID NO: 11577 - DNA, 15 bp, synthetic construct
  source 1..15: mol_type = other DNA
atttgggttggaatg

SEQ ID NO: 11578 - DNA, 15 bp, synthetic construct
  source 1..15: mol_type = other DNA
tacaaagagacagac

SEQ ID NO: 11579 - DNA, 15 bp, synthetic construct
  source 1..15: mol_type = other DNA
cttgttaacttccgg

SEQ ID NO: 11580 - DNA, 15 bp, synthetic construct
  source 1..15: mol_type = other DNA
caaaagagacaaggt

SEQ ID NO: 11581 - DNA, 15 bp, synthetic construct
  source 1..15: mol_type = other DNA
gaatttgatccatta

SEQ ID NO: 11582 - DNA, 15 bp, synthetic construct
  source 1..15: mol_type = other DNA
aaatgctgagagatg

SEQ ID NO: 11583 - DNA, 15 bp, synthetic construct
  source 1..15: mol_type = other DNA
ataatatcctgcctt

SEQ ID NO: 11584 - DNA, 15 bp, synthetic construct
  source 1..15: mol_type = other DNA
gaagaaaggatatcg

SEQ ID NO: 11585 - DNA, 15 bp, synthetic construct
  source 1..15: mol_type = other DNA
ctgtcattttcatgt

SEQ ID NO: 11586 - DNA, 15 bp, synthetic construct
  source 1..15: mol_type = other DNA
gtccttaaatgacat

SEQ ID NO: 11587 - DNA, 15 bp, synthetic construct
  source 1..15: mol_type = other DNA
tgccatggttttctg

SEQ ID NO: 11588 - DNA, 15 bp, synthetic construct
  source 1..15: mol_type = other DNA
gcacctctccccatc

SEQ ID NO: 11589 - DNA, 15 bp, synthetic construct
  source 1..15: mol_type = other DNA
agcttctttgctttg

SEQ ID NO: 11590 - DNA, 15 bp, synthetic construct
  source 1..15: mol_type = other DNA
ctaaaactcagagca

SEQ ID NO: 11591 - DNA, 15 bp, synthetic construct
  source 1..15: mol_type = other DNA
ctgcttttctgctgt

SEQ ID NO: 11592 - DNA, 15 bp, synthetic construct
  source 1..15: mol_type = other DNA
ggcagcaacatttgg

SEQ ID NO: 11593 - DNA, 15 bp, synthetic construct
  source 1..15: mol_type = other DNA
atactgctgaacacc

SEQ ID NO: 11594 - DNA, 15 bp, synthetic construct
  source 1..15: mol_type = other DNA
ctcacagctttgaaa

SEQ ID NO: 11595 - DNA, 15 bp, synthetic construct
  source 1..15: mol_type = other DNA
agcaatggcaggctc

SEQ ID NO: 11596 - DNA, 15 bp, synthetic construct
  source 1..15: mol_type = other DNA
cctttcctagccaac

SEQ ID NO: 11597 - DNA, 15 bp, synthetic construct
  source 1..15: mol_type = other DNA
tgggagtgatccagt

SEQ ID NO: 11598 - DNA, 15 bp, synthetic construct
  source 1..15: mol_type = other DNA
ggagctccagtctat

SEQ ID NO: 11599 - DNA, 15 bp, synthetic construct
  source 1..15: mol_type = other DNA
tgacgagccccagtg

SEQ ID NO: 11600 - DNA, 15 bp, synthetic construct
  source 1..15: mol_type = other DNA
ggcaacaatgcacga

SEQ ID NO: 11601 - DNA, 15 bp, synthetic construct
  source 1..15: mol_type = other DNA
tccttgacccctcaa

SEQ ID NO: 11602 - DNA, 15 bp, synthetic construct
  source 1..15: mol_type = other DNA
tgatggataccctga

SEQ ID NO: 11603 - DNA, 15 bp, synthetic construct
  source 1..15: mol_type = other DNA
tgttacatgcatcga

SEQ ID NO: 11604 - DNA, 15 bp, synthetic construct
  source 1..15: mol_type = other DNA
aaggatagataccaa

SEQ ID NO: 11605 - DNA, 15 bp, synthetic construct
  source 1..15: mol_type = other DNA
cctccagacatacct

SEQ ID NO: 11606 - DNA, 15 bp, synthetic construct
  source 1..15: mol_type = other DNA
acctaagtgtacatc

SEQ ID NO: 11607 - DNA, 15 bp, synthetic construct
  source 1..15: mol_type = other DNA
ttcttctttggtcaa

SEQ ID NO: 11608 - DNA, 15 bp, synthetic construct
  source 1..15: mol_type = other DNA
tgacataatccagca

SEQ ID NO: 11609 - DNA, 15 bp, synthetic construct
  source 1..15: mol_type = other DNA
tttttagtatactga

SEQ ID NO: 11610 - DNA, 15 bp, synthetic construct
  source 1..15: mol_type = other DNA
aagggaaatgcaagc

SEQ ID NO: 11611 - DNA, 15 bp, synthetic construct
  source 1..15: mol_type = other DNA
aagagttccctccac

SEQ ID NO: 11612 - DNA, 15 bp, synthetic construct
  source 1..15: mol_type = other DNA
ggaactccaataact

SEQ ID NO: 11613 - DNA, 15 bp, synthetic construct
  source 1..15: mol_type = other DNA
actttttattggaat

SEQ ID NO: 11614 - DNA, 15 bp, synthetic construct
  source 1..15: mol_type = other DNA
aaatgataaagcttg

SEQ ID NO: 11615 - DNA, 15 bp, synthetic construct
  source 1..15: mol_type = other DNA
ccttgtcagatgagt

SEQ ID NO: 11616 - DNA, 15 bp, synthetic construct
  source 1..15: mol_type = other DNA
ttaaacatgaggcat

SEQ ID NO: 11617 - DNA, 15 bp, synthetic construct
  source 1..15: mol_type = other DNA
ttccccaatgtctcc

SEQ ID NO: 11618 - DNA, 15 bp, synthetic construct
  source 1..15: mol_type = other DNA
acagagtagaacctg

SEQ ID NO: 11619 - DNA, 15 bp, synthetic construct
  source 1..15: mol_type = other DNA
tttttcacatggata

SEQ ID NO: 11620 - DNA, 15 bp, synthetic construct
  source 1..15: mol_type = other DNA
ataacaaagttggat

SEQ ID NO: 11621 - DNA, 15 bp, synthetic construct
  source 1..15: mol_type = other DNA
caggcagtgtgatgc

SEQ ID NO: 11622 - DNA, 15 bp, synthetic construct
  source 1..15: mol_type = other DNA
gaaaagaacacacaa

SEQ ID NO: 11623 - DNA, 15 bp, synthetic construct
  source 1..15: mol_type = other DNA
ggtcattttaatttt

SEQ ID NO: 11624 - DNA, 15 bp, synthetic construct
  source 1..15: mol_type = other DNA
taaaaatcaggctta

SEQ ID NO: 11625 - DNA, 15 bp, synthetic construct
  source 1..15: mol_type = other DNA
atgccttcttgattt

SEQ ID NO: 11626 - DNA, 15 bp, synthetic construct
  source 1..15: mol_type = other DNA
aatgcaaaatcggtt

SEQ ID NO: 11627 - DNA, 15 bp, synthetic construct
  source 1..15: mol_type = other DNA
tggttattttgtttc

SEQ ID NO: 11628 - DNA, 15 bp, synthetic construct
  source 1..15: mol_type = other DNA
actgcaaaagcaatg

SEQ ID NO: 11629 - DNA, 15 bp, synthetic construct
  source 1..15: mol_type = other DNA
ttagattatttaaga

SEQ ID NO: 11630 - DNA, 15 bp, synthetic construct
  source 1..15: mol_type = other DNA
tgtataaataaatgg

SEQ ID NO: 11631 - DNA, 15 bp, synthetic construct
  source 1..15: mol_type = other DNA
gaacatgttaatttc

SEQ ID NO: 11632 - DNA, 15 bp, synthetic construct
  source 1..15: mol_type = other DNA
acagaccagttcata

SEQ ID NO: 11633 - DNA, 15 bp, synthetic construct
  source 1..15: mol_type = other DNA
atataatgtatcctg

SEQ ID NO: 11634 - DNA, 15 bp, synthetic construct
  source 1..15: mol_type = other DNA
aaggcaaacatcaaa

SEQ ID NO: 11635 - DNA, 15 bp, synthetic construct
  source 1..15: mol_type = other DNA
gtgttgaagtctacc

SEQ ID NO: 11636 - DNA, 15 bp, synthetic construct
  source 1..15: mol_type = other DNA
aagaaaggaatggga

SEQ ID NO: 11637 - DNA, 15 bp, synthetic construct
  source 1..15: mol_type = other DNA
cctgtttggtttttg

SEQ ID NO: 11638 - DNA, 15 bp, synthetic construct
  source 1..15: mol_type = other DNA
cttcatgaaagcaca

SEQ ID NO: 11639 - DNA, 15 bp, synthetic construct
  source 1..15: mol_type = other DNA
attcctgtcattaat

SEQ ID NO: 11640 - DNA, 15 bp, synthetic construct
  source 1..15: mol_type = other DNA
ttatatacgcagagt

SEQ ID NO: 11641 - DNA, 15 bp, synthetic construct
  source 1..15: mol_type = other DNA
gaatataactttgct

SEQ ID NO: 11642 - DNA, 15 bp, synthetic construct
  source 1..15: mol_type = other DNA
cacattatagcaaat

SEQ ID NO: 11643 - DNA, 15 bp, synthetic construct
  source 1..15: mol_type = other DNA
tctacaacctctttt

SEQ ID NO: 11644 - DNA, 15 bp, synthetic construct
  source 1..15: mol_type = other DNA
ataggatgccataag

SEQ ID NO: 11645 - DNA, 15 bp, synthetic construct
  source 1..15: mol_type = other DNA
attgggaagtgttca

SEQ ID NO: 11646 - DNA, 15 bp, synthetic construct
  source 1..15: mol_type = other DNA
tcaataacagaccac

SEQ ID NO: 11647 - DNA, 15 bp, synthetic construct
  source 1..15: mol_type = other DNA
tatcttcaaggtgtg

SEQ ID NO: 11648 - DNA, 15 bp, synthetic construct
  source 1..15: mol_type = other DNA
aattgatgaaacctt

SEQ ID NO: 11649 - DNA, 15 bp, synthetic construct
  source 1..15: mol_type = other DNA
tatctatctcttggg

SEQ ID NO: 11650 - DNA, 15 bp, synthetic construct
  source 1..15: mol_type = other DNA
gataccagtgtaagc

SEQ ID NO: 11651 - DNA, 15 bp, synthetic construct
  source 1..15: mol_type = other DNA
tgtcatgttttgcct

SEQ ID NO: 11652 - DNA, 15 bp, synthetic construct
  source 1..15: mol_type = other DNA
tcctaaactacagag

SEQ ID NO: 11653 - DNA, 15 bp, synthetic construct
  source 1..15: mol_type = other DNA
aaacagcaccagtag

SEQ ID NO: 11654 - DNA, 15 bp, synthetic construct
  source 1..15: mol_type = other DNA
tcatcattggcacct

SEQ ID NO: 11655 - DNA, 15 bp, synthetic construct
  source 1..15: mol_type = other DNA
ggaaaccaattttgg

SEQ ID NO: 11656 - DNA, 15 bp, synthetic construct
  source 1..15: mol_type = other DNA
aactgaccattacca

SEQ ID NO: 11657 - DNA, 15 bp, synthetic construct
  source 1..15: mol_type = other DNA
gcaaattcaagtgaa

SEQ ID NO: 11658 - DNA, 15 bp, synthetic construct
  source 1..15: mol_type = other DNA
tcagcagggtataca

SEQ ID NO: 11659 - DNA, 15 bp, synthetic construct
  source 1..15: mol_type = other DNA
atgcaagaatgtact

SEQ ID NO: 11660 - DNA, 15 bp, synthetic construct
  source 1..15: mol_type = other DNA
gccattggcaatact

SEQ ID NO: 11661 - DNA, 15 bp, synthetic construct
  source 1..15: mol_type = other DNA
aaacaggcagttggg

SEQ ID NO: 11662 - DNA, 15 bp, synthetic construct
  source 1..15: mol_type = other DNA
aagtcccattttgat

SEQ ID NO: 11663 - DNA, 15 bp, synthetic construct
  source 1..15: mol_type = other DNA
gtgtaagggatgtcc

SEQ ID NO: 11664 - DNA, 15 bp, synthetic construct
  source 1..15: mol_type = other DNA
cctagtcagagaacc

SEQ ID NO: 11665 - DNA, 15 bp, synthetic construct
  source 1..15: mol_type = other DNA
tcacagtctgtaggt

SEQ ID NO: 11666 - DNA, 15 bp, synthetic construct
  source 1..15: mol_type = other DNA
cctctgagagaatgc

SEQ ID NO: 11667 - DNA, 15 bp, synthetic construct
  source 1..15: mol_type = other DNA
cattgggtttttctt

SEQ ID NO: 11668 - DNA, 15 bp, synthetic construct
  source 1..15: mol_type = other DNA
attgaaagaaaaatg

SEQ ID NO: 11669 - DNA, 15 bp, synthetic construct
  source 1..15: mol_type = other DNA
atctggatagggatt

SEQ ID NO: 11670 - DNA, 15 bp, synthetic construct
  source 1..15: mol_type = other DNA
ttctgtgaaacagca

SEQ ID NO: 11671 - DNA, 15 bp, synthetic construct
  source 1..15: mol_type = other DNA
tttcttcatttctct

SEQ ID NO: 11672 - DNA, 15 bp, synthetic construct
  source 1..15: mol_type = other DNA
gcaaaacctcatcag

SEQ ID NO: 11673 - DNA, 15 bp, synthetic construct
  source 1..15: mol_type = other DNA
ctgaacttcaggtgc

SEQ ID NO: 11674 - DNA, 15 bp, synthetic construct
  source 1..15: mol_type = other DNA
agattccaccaaaat

SEQ ID NO: 11675 - DNA, 15 bp, synthetic construct
  source 1..15: mol_type = other DNA
ccacacctactaatt

SEQ ID NO: 11676 - DNA, 15 bp, synthetic construct
  source 1..15: mol_type = other DNA
agaaaagtcctcacc

SEQ ID NO: 11677 - DNA, 15 bp, synthetic construct
  source 1..15: mol_type = other DNA
tccaatttggatacc

SEQ ID NO: 11678 - DNA, 15 bp, synthetic construct
  source 1..15: mol_type = other DNA
aaattcaaaatctct

SEQ ID NO: 11679 - DNA, 15 bp, synthetic construct
  source 1..15: mol_type = other DNA
tatgttccttctaga

SEQ ID NO: 11680 - DNA, 15 bp, synthetic construct
  source 1..15: mol_type = other DNA
cacaaactagcaatc

SEQ ID NO: 11681 - DNA, 15 bp, synthetic construct
  source 1..15: mol_type = other DNA
tttttgatgtgcgat

SEQ ID NO: 11682 - DNA, 15 bp, synthetic construct
  source 1..15: mol_type = other DNA
taaagaactaacatg

SEQ ID NO: 11683 - DNA, 15 bp, synthetic construct
  source 1..15: mol_type = other DNA
cttttggaattgtct

SEQ ID NO: 11684 - DNA, 15 bp, synthetic construct
  source 1..15: mol_type = other DNA
aaggaatgagattgt

SEQ ID NO: 11685 - DNA, 15 bp, synthetic construct
  source 1..15: mol_type = other DNA
gagactttattactg

SEQ ID NO: 11686 - DNA, 15 bp, synthetic construct
  source 1..15: mol_type = other DNA
gactaaccaagaaga

SEQ ID NO: 11687 - DNA, 15 bp, synthetic construct
  source 1..15: mol_type = other DNA
ttttatttattgggt

SEQ ID NO: 11688 - DNA, 15 bp, synthetic construct
  source 1..15: mol_type = other DNA
cagcttctgagtaga

SEQ ID NO: 11689 - DNA, 15 bp, synthetic construct
  source 1..15: mol_type = other DNA
gtggtgctgcacatc

SEQ ID NO: 11690 - DNA, 15 bp, synthetic construct
  source 1..15: mol_type = other DNA
aaacctaaaattaga

SEQ ID NO: 11691 - DNA, 15 bp, synthetic construct
  source 1..15: mol_type = other DNA
attgatcttttgtct

SEQ ID NO: 11692 - DNA, 15 bp, synthetic construct
  source 1..15: mol_type = other DNA
aaggtagaaagtttt

SEQ ID NO: 11693 - DNA, 15 bp, synthetic construct
  source 1..15: mol_type = other DNA
ttgagatgcgtttat

SEQ ID NO: 11694 - DNA, 15 bp, synthetic construct
  source 1..15: mol_type = other DNA
aattgaacagataca

SEQ ID NO: 11695 - DNA, 15 bp, synthetic construct
  source 1..15: mol_type = other DNA
agacacagtggtcat

SEQ ID NO: 11696 - DNA, 15 bp, synthetic construct
  source 1..15: mol_type = other DNA
aactgctgcttcgtt

SEQ ID NO: 11697 - DNA, 15 bp, synthetic construct
  source 1..15: mol_type = other DNA
agacccgttttgtgt

SEQ ID NO: 11698 - DNA, 15 bp, synthetic construct
  source 1..15: mol_type = other DNA
attatatatgcaacc

SEQ ID NO: 11699 - DNA, 15 bp, synthetic construct
  source 1..15: mol_type = other DNA
ctgggtactccagtg

SEQ ID NO: 11700 - DNA, 15 bp, synthetic construct
  source 1..15: mol_type = other DNA
agaaactgacttcac

SEQ ID NO: 11701 - DNA, 15 bp, synthetic construct
  source 1..15: mol_type = other DNA
tctttttctatccat

SEQ ID NO: 11702 - DNA, 15 bp, synthetic construct
  source 1..15: mol_type = other DNA
acaatgagaggaaac

SEQ ID NO: 11703 - DNA, 15 bp, synthetic construct
  source 1..15: mol_type = other DNA
tgttttctgactgat

SEQ ID NO: 11704 - DNA, 15 bp, synthetic construct
  source 1..15: mol_type = other DNA
taaatcagccccaca

SEQ ID NO: 11705 - DNA, 15 bp, synthetic construct
  source 1..15: mol_type = other DNA
cagatgtagtactcc

SEQ ID NO: 11706 - DNA, 15 bp, synthetic construct
  source 1..15: mol_type = other DNA
gattaacagattttt

SEQ ID NO: 11707 - DNA, 15 bp, synthetic construct
  source 1..15: mol_type = other DNA
gcacttttaatatgg

SEQ ID NO: 11708 - DNA, 15 bp, synthetic construct
  source 1..15: mol_type = other DNA
gaaaactgccaaagt

SEQ ID NO: 11709 - DNA, 15 bp, synthetic construct
  source 1..15: mol_type = other DNA
tagtctctttctctc

SEQ ID NO: 11710 - DNA, 15 bp, synthetic construct
  source 1..15: mol_type = other DNA
ttcaaaagccggcta

SEQ ID NO: 11711 - DNA, 15 bp, synthetic construct
  source 1..15: mol_type = other DNA
tcttctgcttgactt

SEQ ID NO: 11712 - DNA, 15 bp, synthetic construct
  source 1..15: mol_type = other DNA
caataattctccaat

SEQ ID NO: 11713 - DNA, 15 bp, synthetic construct
  source 1..15: mol_type = other DNA
tgtatctcattgggt

SEQ ID NO: 11714 - DNA, 15 bp, synthetic construct
  source 1..15: mol_type = other DNA
tacagacgcgtgtac

SEQ ID NO: 11715 - DNA, 15 bp, synthetic construct
  source 1..15: mol_type = other DNA
ggagtagccttagta

SEQ ID NO: 11716 - DNA, 15 bp, synthetic construct
  source 1..15: mol_type = other DNA
agttagcaacatcag

SEQ ID NO: 11717 - DNA, 15 bp, synthetic construct
  source 1..15: mol_type = other DNA
tagaggtacttactc

SEQ ID NO: 11718 - DNA, 15 bp, synthetic construct
  source 1..15: mol_type = other DNA
catcctcccctaaaa

SEQ ID NO: 11719 - DNA, 15 bp, synthetic construct
  source 1..15: mol_type = other DNA
gtggttttatttgca

SEQ ID NO: 11720 - DNA, 15 bp, synthetic construct
  source 1..15: mol_type = other DNA
acaatgtaggcagag

SEQ ID NO: 11721 - DNA, 15 bp, synthetic construct
  source 1..15: mol_type = other DNA
tccctggttaaaacc

SEQ ID NO: 11722 - DNA, 15 bp, synthetic construct
  source 1..15: mol_type = other DNA
tcaataagtgaccag

SEQ ID NO: 11723 - DNA, 15 bp, synthetic construct
  source 1..15: mol_type = other DNA
tcacataacagctca

SEQ ID NO: 11724 - DNA, 15 bp, synthetic construct
  source 1..15: mol_type = other DNA
actagtgaaagataa

SEQ ID NO: 11725 - DNA, 15 bp, synthetic construct
  source 1..15: mol_type = other DNA
gagttctacaagcgg

SEQ ID NO: 11726 - DNA, 15 bp, synthetic construct
  source 1..15: mol_type = other DNA
gtaaagaacacaata

SEQ ID NO: 11727 - DNA, 15 bp, synthetic construct
  source 1..15: mol_type = other DNA
ctaagggcatatgag

SEQ ID NO: 11728 - DNA, 15 bp, synthetic construct
  source 1..15: mol_type = other DNA
gtcaacacttgagga

SEQ ID NO: 11729 - DNA, 15 bp, synthetic construct
  source 1..15: mol_type = other DNA
tctatacgttttctc

SEQ ID NO: 11730 - DNA, 15 bp, synthetic construct
  source 1..15: mol_type = other DNA
tcaactcagcttggc

SEQ ID NO: 11731 - DNA, 15 bp, synthetic construct
  source 1..15: mol_type = other DNA
ctcctactcacagcc

SEQ ID NO: 11732 - DNA, 15 bp, synthetic construct
  source 1..15: mol_type = other DNA
aaacacaggtccctt

SEQ ID NO: 11733 - DNA, 15 bp, synthetic construct
  source 1..15: mol_type = other DNA
tttgagaagctatgg

SEQ ID NO: 11734 - DNA, 15 bp, synthetic construct
  source 1..15: mol_type = other DNA
tagtgagggagaagc

SEQ ID NO: 11735 - DNA, 15 bp, synthetic construct
  source 1..15: mol_type = other DNA
cccattaaacattct

SEQ ID NO: 11736 - DNA, 15 bp, synthetic construct
  source 1..15: mol_type = other DNA
atcttttcaccttca

SEQ ID NO: 11737 - DNA, 15 bp, synthetic construct
  source 1..15: mol_type = other DNA
gttaagaactggcac

SEQ ID NO: 11738 - DNA, 15 bp, synthetic construct
  source 1..15: mol_type = other DNA
gcactatcttctcca

SEQ ID NO: 11739 - DNA, 15 bp, synthetic construct
  source 1..15: mol_type = other DNA
tccagaaactttcct

SEQ ID NO: 11740 - DNA, 15 bp, synthetic construct
  source 1..15: mol_type = other DNA
acacaactaaaatcg

SEQ ID NO: 11741 - DNA, 15 bp, synthetic construct
  source 1..15: mol_type = other DNA
tagacagtgacttcc

SEQ ID NO: 11742 - DNA, 15 bp, synthetic construct
  source 1..15: mol_type = other DNA
acttctccttagaat

SEQ ID NO: 11743 - DNA, 15 bp, synthetic construct
  source 1..15: mol_type = other DNA
ctctgagatttgtgt

SEQ ID NO: 11744 - DNA, 15 bp, synthetic construct
  source 1..15: mol_type = other DNA
gtatgaggatgtttg

SEQ ID NO: 11745 - DNA, 15 bp, synthetic construct
  source 1..15: mol_type = other DNA
attccggaagtcatc

SEQ ID NO: 11746 - DNA, 15 bp, synthetic construct
  source 1..15: mol_type = other DNA
cttggaaagggattt

SEQ ID NO: 11747 - DNA, 15 bp, synthetic construct
  source 1..15: mol_type = other DNA
tagaaagccaatgtc

SEQ ID NO: 11748 - DNA, 15 bp, synthetic construct
  source 1..15: mol_type = other DNA
aagagagtcttcagg

SEQ ID NO: 11749 - DNA, 15 bp, synthetic construct
  source 1..15: mol_type = other DNA
ccagtttagctattt

SEQ ID NO: 11750 - DNA, 15 bp, synthetic construct
  source 1..15: mol_type = other DNA
caagtgagcaagatc

SEQ ID NO: 11751 - DNA, 15 bp, synthetic construct
  source 1..15: mol_type = other DNA
acaaaagggacattt

SEQ ID NO: 11752 - DNA, 15 bp, synthetic construct
  source 1..15: mol_type = other DNA
gctgttgaatgcaag

SEQ ID NO: 11753 - DNA, 15 bp, synthetic construct
  source 1..15: mol_type = other DNA
tccttaggcagctac

SEQ ID NO: 11754 - DNA, 15 bp, synthetic construct
  source 1..15: mol_type = other DNA
tcccactcctagtgt

SEQ ID NO: 11755 - DNA, 15 bp, synthetic construct
  source 1..15: mol_type = other DNA
agggtacctaaacac

SEQ ID NO: 11756 - DNA, 15 bp, synthetic construct
  source 1..15: mol_type = other DNA
agaggcgagaagtaa

SEQ ID NO: 11757 - DNA, 15 bp, synthetic construct
  source 1..15: mol_type = other DNA
gcttttacactttcc

SEQ ID NO: 11758 - DNA, 15 bp, synthetic construct
  source 1..15: mol_type = other DNA
ctccccctctcagtg

SEQ ID NO: 11759 - DNA, 15 bp, synthetic construct
  source 1..15: mol_type = other DNA
tcacagtgcaggatc

SEQ ID NO: 11760 - DNA, 15 bp, synthetic construct
  source 1..15: mol_type = other DNA
ggctgcagggcttat

SEQ ID NO: 11761 - DNA, 15 bp, synthetic construct
  source 1..15: mol_type = other DNA
ctgttcatccttgtg

SEQ ID NO: 11762 - DNA, 15 bp, synthetic construct
  source 1..15: mol_type = other DNA
cttcacccaaccact

SEQ ID NO: 11763 - DNA, 15 bp, synthetic construct
  source 1..15: mol_type = other DNA
attaggccggatttt

SEQ ID NO: 11764 - DNA, 15 bp, synthetic construct
  source 1..15: mol_type = other DNA
tgttcccaagaaatt

SEQ ID NO: 11765 - DNA, 15 bp, synthetic construct
  source 1..15: mol_type = other DNA
gtcataggctggact

SEQ ID NO: 11766 - DNA, 15 bp, synthetic construct
  source 1..15: mol_type = other DNA
gtctcctgtatctgt

SEQ ID NO: 11767 - DNA, 15 bp, synthetic construct
  source 1..15: mol_type = other DNA
tttcatgataggaga

SEQ ID NO: 11768 - DNA, 15 bp, synthetic construct
  source 1..15: mol_type = other DNA
atccaaatgttaact

SEQ ID NO: 11769 - DNA, 15 bp, synthetic construct
  source 1..15: mol_type = other DNA
aaatgaaaatcaccc

SEQ ID NO: 11770 - DNA, 15 bp, synthetic construct
  source 1..15: mol_type = other DNA
ggaaagtgggaggtc

SEQ ID NO: 11771 - DNA, 15 bp, synthetic construct
  source 1..15: mol_type = other DNA
tgattcctgttctct

SEQ ID NO: 11772 - DNA, 15 bp, synthetic construct
  source 1..15: mol_type = other DNA
tgaagtcacactttc

SEQ ID NO: 11773 - DNA, 15 bp, synthetic construct
  source 1..15: mol_type = other DNA
attaaagcatcaaaa

SEQ ID NO: 11774 - DNA, 15 bp, synthetic construct
  source 1..15: mol_type = other DNA
aagtgggtatttcac

SEQ ID NO: 11775 - DNA, 15 bp, synthetic construct
  source 1..15: mol_type = other DNA
tatccagatgaactg

SEQ ID NO: 11776 - DNA, 15 bp, synthetic construct
  source 1..15: mol_type = other DNA
cacctgtggtcgtag

SEQ ID NO: 11777 - DNA, 15 bp, synthetic construct
  source 1..15: mol_type = other DNA
gaaagagctgaatcc

SEQ ID NO: 11778 - DNA, 15 bp, synthetic construct
  source 1..15: mol_type = other DNA
gggaacggcatatgg

SEQ ID NO: 11779 - DNA, 15 bp, synthetic construct
  source 1..15: mol_type = other DNA
tcctcttgaattgga

SEQ ID NO: 11780 - DNA, 15 bp, synthetic construct
  source 1..15: mol_type = other DNA
acccatgatgacaag

SEQ ID NO: 11781 - DNA, 15 bp, synthetic construct
  source 1..15: mol_type = other DNA
cacattttaatttcc

SEQ ID NO: 11782 - DNA, 15 bp, synthetic construct
  source 1..15: mol_type = other DNA
gtcaagtgacagagc

SEQ ID NO: 11783 - DNA, 15 bp, synthetic construct
  source 1..15: mol_type = other DNA
caagtgatgcaaaca

SEQ ID NO: 11784 - DNA, 15 bp, synthetic construct
  source 1..15: mol_type = other DNA
atccttagagagacc

SEQ ID NO: 11785 - DNA, 15 bp, synthetic construct
  source 1..15: mol_type = other DNA
cacattcttcaagcc

SEQ ID NO: 11786 - DNA, 15 bp, synthetic construct
  source 1..15: mol_type = other DNA
aaagtagcacatcac

SEQ ID NO: 11787 - DNA, 15 bp, synthetic construct
  source 1..15: mol_type = other DNA
ctgagtttatttaca

SEQ ID NO: 11788 - DNA, 15 bp, synthetic construct
  source 1..15: mol_type = other DNA
atgagagagaagact

SEQ ID NO: 11789 - DNA, 15 bp, synthetic construct
  source 1..15: mol_type = other DNA
ttgggtcttaactct

SEQ ID NO: 11790 - DNA, 15 bp, synthetic construct
  source 1..15: mol_type = other DNA
gagcagttggatacc

SEQ ID NO: 11791 - DNA, 15 bp, synthetic construct
  source 1..15: mol_type = other DNA
attaagggtccaact

SEQ ID NO: 11792 - DNA, 15 bp, synthetic construct
  source 1..15: mol_type = other DNA
gctgtaccaaacatc

SEQ ID NO: 11793 - DNA, 15 bp, synthetic construct
  source 1..15: mol_type = other DNA
actgccttggaagaa

SEQ ID NO: 11794 - DNA, 15 bp, synthetic construct
  source 1..15: mol_type = other DNA
gatataaatggagaa

SEQ ID NO: 11795 - DNA, 15 bp, synthetic construct
  source 1..15: mol_type = other DNA
gtcattggaatgaag

SEQ ID NO: 11796 - DNA, 15 bp, synthetic construct
  source 1..15: mol_type = other DNA
ggatgtgggtactcg

SEQ ID NO: 11797 - DNA, 15 bp, synthetic construct
  source 1..15: mol_type = other DNA
tcttgttacctcaca

SEQ ID NO: 11798 - DNA, 15 bp, synthetic construct
  source 1..15: mol_type = other DNA
caataaatgtaatga

SEQ ID NO: 11799 - DNA, 15 bp, synthetic construct
  source 1..15: mol_type = other DNA
ccagtttaactacta

SEQ ID NO: 11800 - DNA, 15 bp, synthetic construct
  source 1..15: mol_type = other DNA
tgaggaaagcatctc

SEQ ID NO: 11801 - DNA, 15 bp, synthetic construct
  source 1..15: mol_type = other DNA
agtcaggtgtcattg

SEQ ID NO: 11802 - DNA, 15 bp, synthetic construct
  source 1..15: mol_type = other DNA
ttctaaagactaagc

SEQ ID NO: 11803 - DNA, 15 bp, synthetic construct
  source 1..15: mol_type = other DNA
actgtaagtgaatag

SEQ ID NO: 11804 - DNA, 15 bp, synthetic construct
  source 1..15: mol_type = other DNA
tttgctgcaggaaaa

SEQ ID NO: 11805 - DNA, 15 bp, synthetic construct
  source 1..15: mol_type = other DNA
aaaactaccacagca

SEQ ID NO: 11806 - DNA, 15 bp, synthetic construct
  source 1..15: mol_type = other DNA
atcttccttataaag

SEQ ID NO: 11807 - DNA, 15 bp, synthetic construct
  source 1..15: mol_type = other DNA
attttcctcattcct

SEQ ID NO: 11808 - DNA, 15 bp, synthetic construct
  source 1..15: mol_type = other DNA
ctagaaaagaaatgc

SEQ ID NO: 11809 - DNA, 15 bp, synthetic construct
  source 1..15: mol_type = other DNA
ttcatttatttttaa

SEQ ID NO: 11810 - DNA, 15 bp, synthetic construct
  source 1..15: mol_type = other DNA
gagactgaagcaatg

SEQ ID NO: 11811 - DNA, 15 bp, synthetic construct
  source 1..15: mol_type = other DNA
gaatagaaaacctgg

SEQ ID NO: 11812 - DNA, 15 bp, synthetic construct
  source 1..15: mol_type = other DNA
gagccaggtttctag

SEQ ID NO: 11813 - DNA, 15 bp, synthetic construct
  source 1..15: mol_type = other DNA
acaacttatttatag

SEQ ID NO: 11814 - DNA, 15 bp, synthetic construct
  source 1..15: mol_type = other DNA
gttacaaacaaatga

SEQ ID NO: 11815 - DNA, 15 bp, synthetic construct
  source 1..15: mol_type = other DNA
aaagcaacatatgcc

SEQ ID NO: 11816 - DNA, 15 bp, synthetic construct
  source 1..15: mol_type = other DNA
actcaccccagggta

SEQ ID NO: 11817 - DNA, 15 bp, synthetic construct
  source 1..15: mol_type = other DNA
agtatcattcacaga

SEQ ID NO: 11818 - DNA, 15 bp, synthetic construct
  source 1..15: mol_type = other DNA
aaagaaattaactaa

SEQ ID NO: 11819 - DNA, 15 bp, synthetic construct
  source 1..15: mol_type = other DNA
actgcttagcaaaat

SEQ ID NO: 11820 - DNA, 15 bp, synthetic construct
  source 1..15: mol_type = other DNA
cacatgacctatcgg

SEQ ID NO: 11821 - DNA, 15 bp, synthetic construct
  source 1..15: mol_type = other DNA
cattgtttccagtat

SEQ ID NO: 11822 - DNA, 15 bp, synthetic construct
  source 1..15: mol_type = other DNA
tgacaataccaacca

SEQ ID NO: 11823 - DNA, 15 bp, synthetic construct
  source 1..15: mol_type = other DNA
actgtgccattttgc

SEQ ID NO: 11824 - DNA, 15 bp, synthetic construct
  source 1..15: mol_type = other DNA
acttgcactcagaat

SEQ ID NO: 11825 - DNA, 15 bp, synthetic construct
  source 1..15: mol_type = other DNA
aagttgtaagcattc

SEQ ID NO: 11826 - DNA, 15 bp, synthetic construct
  source 1..15: mol_type = other DNA
tgaattctgaaatac

SEQ ID NO: 11827 - DNA, 15 bp, synthetic construct
  source 1..15: mol_type = other DNA
ctttttctcttacga

SEQ ID NO: 11828 - DNA, 15 bp, synthetic construct
  source 1..15: mol_type = other DNA
tttaatgcatttagt

SEQ ID NO: 11829 - DNA, 15 bp, synthetic construct
  source 1..15: mol_type = other DNA
tgatcatctgtccta

SEQ ID NO: 11830 - DNA, 15 bp, synthetic construct
  source 1..15: mol_type = other DNA
ccccagtctgttttt

SEQ ID NO: 11831 - DNA, 15 bp, synthetic construct
  source 1..15: mol_type = other DNA
acgctgatgtgggaa

SEQ ID NO: 11832 - DNA, 15 bp, synthetic construct
  source 1..15: mol_type = other DNA
tatgggcttggcatc

SEQ ID NO: 11833 - DNA, 15 bp, synthetic construct
  source 1..15: mol_type = other DNA
aagcaaaagtgagca

SEQ ID NO: 11834 - DNA, 15 bp, synthetic construct
  source 1..15: mol_type = other DNA
tcccaagaagttgta

SEQ ID NO: 11835 - DNA, 15 bp, synthetic construct
  source 1..15: mol_type = other DNA
ttcattcgggcttca

SEQ ID NO: 11836 - DNA, 15 bp, synthetic construct
  source 1..15: mol_type = other DNA
ttggccacagctaac

SEQ ID NO: 11837 - DNA, 15 bp, synthetic construct
  source 1..15: mol_type = other DNA
taagagcctgaatgt

SEQ ID NO: 11838 - DNA, 15 bp, synthetic construct
  source 1..15: mol_type = other DNA
cagtgttaactgcca

SEQ ID NO: 11839 - DNA, 15 bp, synthetic construct
  source 1..15: mol_type = other DNA
gtgacatcccatgtg

SEQ ID NO: 11840 - DNA, 15 bp, synthetic construct
  source 1..15: mol_type = other DNA
ttatcactccccact

SEQ ID NO: 11841 - DNA, 15 bp, synthetic construct
  source 1..15: mol_type = other DNA
aatactgatagtgtc

SEQ ID NO: 11842 - DNA, 15 bp, synthetic construct
  source 1..15: mol_type = other DNA
gggtcaggaaagatg

SEQ ID NO: 11843 - DNA, 15 bp, synthetic construct
  source 1..15: mol_type = other DNA
tcagaggtcctatca

SEQ ID NO: 11844 - DNA, 15 bp, synthetic construct
  source 1..15: mol_type = other DNA
agaataaaggccagt

SEQ ID NO: 11845 - DNA, 15 bp, synthetic construct
  source 1..15: mol_type = other DNA
agttaccactccgaa

SEQ ID NO: 11846 - DNA, 15 bp, synthetic construct
  source 1..15: mol_type = other DNA
ttgggctcttcctta

SEQ ID NO: 11847 - DNA, 15 bp, synthetic construct
  source 1..15: mol_type = other DNA
actataaaactgatt

SEQ ID NO: 11848 - DNA, 15 bp, synthetic construct
  source 1..15: mol_type = other DNA
gtcagcagagtctcc

SEQ ID NO: 11849 - DNA, 15 bp, synthetic construct
  source 1..15: mol_type = other DNA
atttcatgagaacca

SEQ ID NO: 11850 - DNA, 15 bp, synthetic construct
  source 1..15: mol_type = other DNA
ctaggcgagtagata

SEQ ID NO: 11851 - DNA, 15 bp, synthetic construct
  source 1..15: mol_type = other DNA
acagtgagtgcctac

SEQ ID NO: 11852 - DNA, 15 bp, synthetic construct
  source 1..15: mol_type = other DNA
ggaaaatgatcagtc

SEQ ID NO: 11853 - DNA, 15 bp, synthetic construct
  source 1..15: mol_type = other DNA
tcctcttgttttgac

SEQ ID NO: 11854 - DNA, 15 bp, synthetic construct
  source 1..15: mol_type = other DNA
ggaaggcgtggaaaa

SEQ ID NO: 11855 - DNA, 15 bp, synthetic construct
  source 1..15: mol_type = other DNA
gtggaggaaatggct

SEQ ID NO: 11856 - DNA, 15 bp, synthetic construct
  source 1..15: mol_type = other DNA
tccccaacgggttag

SEQ ID NO: 11857 - DNA, 15 bp, synthetic construct
  source 1..15: mol_type = other DNA
ctgcgacatgtgact

SEQ ID NO: 11858 - DNA, 15 bp, synthetic construct
  source 1..15: mol_type = other DNA
tagaaaaatgttggt

SEQ ID NO: 11859 - DNA, 15 bp, synthetic construct
  source 1..15: mol_type = other DNA
taaatgtctttgtgt

SEQ ID NO: 11860 - DNA, 15 bp, synthetic construct
  source 1..15: mol_type = other DNA
acaaagacacacatg

SEQ ID NO: 11861 - DNA, 15 bp, synthetic construct
  source 1..15: mol_type = other DNA
tttggactctctggg

SEQ ID NO: 11862 - DNA, 15 bp, synthetic construct
  source 1..15: mol_type = other DNA
tcctgtctgatcata

SEQ ID NO: 11863 - DNA, 15 bp, synthetic construct
  source 1..15: mol_type = other DNA
gtagccagaatgagg

SEQ ID NO: 11864 - DNA, 15 bp, synthetic construct
  source 1..15: mol_type = other DNA
ctcctgcctttttac

SEQ ID NO: 11865 - DNA, 15 bp, synthetic construct
  source 1..15: mol_type = other DNA
gacaccctgagaata

SEQ ID NO: 11866 - DNA, 15 bp, synthetic construct
  source 1..15: mol_type = other DNA
ttgcacacaacatga

SEQ ID NO: 11867 - DNA, 15 bp, synthetic construct
  source 1..15: mol_type = other DNA
cctggatatgatgga

SEQ ID NO: 11868 - DNA, 15 bp, synthetic construct
  source 1..15: mol_type = other DNA
ccagtaggacttttt

SEQ ID NO: 11869 - DNA, 15 bp, synthetic construct
  source 1..15: mol_type = other DNA
ttggagctctcgctc

SEQ ID NO: 11870 - DNA, 15 bp, synthetic construct
  source 1..15: mol_type = other DNA
ggcatgtgctgatac

SEQ ID NO: 11871 - DNA, 15 bp, synthetic construct
  source 1..15: mol_type = other DNA
acagccaaacttgca

SEQ ID NO: 11872 - DNA, 15 bp, synthetic construct
  source 1..15: mol_type = other DNA
cagaatggtaatgtg

SEQ ID NO: 11873 - DNA, 15 bp, synthetic construct
  source 1..15: mol_type = other DNA
actccaggatgacag

SEQ ID NO: 11874 - DNA, 15 bp, synthetic construct
  source 1..15: mol_type = other DNA
agcagccacttttgg

SEQ ID NO: 11875 - DNA, 15 bp, synthetic construct
  source 1..15: mol_type = other DNA
ggttggcactcccat

SEQ ID NO: 11876 - DNA, 15 bp, synthetic construct
  source 1..15: mol_type = other DNA
acacaatgcctcaag

SEQ ID NO: 11877 - DNA, 15 bp, synthetic construct
  source 1..15: mol_type = other DNA
caaggaggttgctgc

SEQ ID NO: 11878 - DNA, 15 bp, synthetic construct
  source 1..15: mol_type = other DNA
tctcccccagatgga

SEQ ID NO: 11879 - DNA, 15 bp, synthetic construct
  source 1..15: mol_type = other DNA
gctcctctgggatac

SEQ ID NO: 11880 - DNA, 15 bp, synthetic construct
  source 1..15: mol_type = other DNA
cagttcagggtccat

SEQ ID NO: 11881 - DNA, 15 bp, synthetic construct
  source 1..15: mol_type = other DNA
gtgatgcccataatt

SEQ ID NO: 11882 - DNA, 15 bp, synthetic construct
  source 1..15: mol_type = other DNA
gcccagcatggtaat

SEQ ID NO: 11883 - DNA, 15 bp, synthetic construct
  source 1..15: mol_type = other DNA
ttcagcattctactg

SEQ ID NO: 11884 - DNA, 15 bp, synthetic construct
  source 1..15: mol_type = other DNA
cttcccgtaatcaag

SEQ ID NO: 11885 - DNA, 15 bp, synthetic construct
  source 1..15: mol_type = other DNA
ccatctcgagctctc

SEQ ID NO: 11886 - DNA, 15 bp, synthetic construct
  source 1..15: mol_type = other DNA
tttatctcctgggta

SEQ ID NO: 11887 - DNA, 15 bp, synthetic construct
  source 1..15: mol_type = other DNA
gtcatgacaagctga

SEQ ID NO: 11888 - DNA, 15 bp, synthetic construct
  source 1..15: mol_type = other DNA
cctttctctcagaag

SEQ ID NO: 11889 - DNA, 15 bp, synthetic construct
  source 1..15: mol_type = other DNA
cacccagaaccatat

SEQ ID NO: 11890 - DNA, 15 bp, synthetic construct
  source 1..15: mol_type = other DNA
tagatggcaggttac

SEQ ID NO: 11891 - DNA, 15 bp, synthetic construct
  source 1..15: mol_type = other DNA
tgacccactcactat

SEQ ID NO: 11892 - DNA, 15 bp, synthetic construct
  source 1..15: mol_type = other DNA
aggcttagggaactg

SEQ ID NO: 11893 - DNA, 15 bp, synthetic construct
  source 1..15: mol_type = other DNA
tttccattcatcttt

SEQ ID NO: 11894 - DNA, 15 bp, synthetic construct
  source 1..15: mol_type = other DNA
ccttgcttcatctta

SEQ ID NO: 11895 - DNA, 15 bp, synthetic construct
  source 1..15: mol_type = other DNA
ctgctcactcaaccc

SEQ ID NO: 11896 - DNA, 15 bp, synthetic construct
  source 1..15: mol_type = other DNA
catgtgcaaccaatg

SEQ ID NO: 11897 - DNA, 15 bp, synthetic construct
  source 1..15: mol_type = other DNA
ccctcacactgcatc

SEQ ID NO: 11898 - DNA, 15 bp, synthetic construct
  source 1..15: mol_type = other DNA
tccctctggagagtg

SEQ ID NO: 11899 - DNA, 30 bp, synthetic construct
  source 1..30: mol_type = other DNA
gttaacagataccgctccctctggagagtg

SEQ ID NO: 11900 - DNA, 15 bp, synthetic construct
  source 1..15: mol_type = other DNA
taattaacgcacacg

SEQ ID NO: 11901 - DNA, 15 bp, synthetic construct
  source 1..15: mol_type = other DNA
cagcttcgcaaatcc

SEQ ID NO: 11902 - DNA, 15 bp, synthetic construct
  source 1..15: mol_type = other DNA
ttatttccagacagc

SEQ ID NO: 11903 - DNA, 15 bp, synthetic construct
  source 1..15: mol_type = other DNA
atttgtcagcaagga

SEQ ID NO: 11904 - DNA, 15 bp, synthetic construct
  source 1..15: mol_type = other DNA
tcccaccaaagttta

SEQ ID NO: 11905 - DNA, 15 bp, synthetic construct
  source 1..15: mol_type = other DNA
agctcctcaccatat

SEQ ID NO: 11906 - DNA, 15 bp, synthetic construct
  source 1..15: mol_type = other DNA
catgcagccctgtac

SEQ ID NO: 11907 - DNA, 15 bp, synthetic construct
  source 1..15: mol_type = other DNA
gtctttctagaccag

SEQ ID NO: 11908 - DNA, 15 bp, synthetic construct
  source 1..15: mol_type = other DNA
caatcccatctcttt

SEQ ID NO: 11909 - DNA, 15 bp, synthetic construct
  source 1..15: mol_type = other DNA
cgaggcgtaatggct

SEQ ID NO: 11910 - DNA, 15 bp, synthetic construct
  source 1..15: mol_type = other DNA
gaggaaatgagaagc

SEQ ID NO: 11911 - DNA, 15 bp, synthetic construct
  source 1..15: mol_type = other DNA
tcctccgtctgagca

SEQ ID NO: 11912 - DNA, 15 bp, synthetic construct
  source 1..15: mol_type = other DNA
tgttctctctgtcac

SEQ ID NO: 11913 - DNA, 15 bp, synthetic construct
  source 1..15: mol_type = other DNA
ccacttgtgaactcc

SEQ ID NO: 11914 - DNA, 15 bp, synthetic construct
  source 1..15: mol_type = other DNA
aatctcccctttcag

SEQ ID NO: 11915 - DNA, 15 bp, synthetic construct
  source 1..15: mol_type = other DNA
atatagatctcttgt

SEQ ID NO: 11916 - DNA, 15 bp, synthetic construct
  source 1..15: mol_type = other DNA
tgcatgcacattacc

SEQ ID NO: 11917 - DNA, 15 bp, synthetic construct
  source 1..15: mol_type = other DNA
tggtggtgttaaact

SEQ ID NO: 11918 - DNA, 15 bp, synthetic construct
  source 1..15: mol_type = other DNA
attcccaccgcataa

SEQ ID NO: 11919 - DNA, 15 bp, synthetic construct
  source 1..15: mol_type = other DNA
taaccacaggcctaa

SEQ ID NO: 11920 - DNA, 15 bp, synthetic construct
  source 1..15: mol_type = other DNA
acctacaccagaaac

SEQ ID NO: 11921 - DNA, 15 bp, synthetic construct
  source 1..15: mol_type = other DNA
ggcctacatcattca

SEQ ID NO: 11922 - DNA, 15 bp, synthetic construct
  source 1..15: mol_type = other DNA
gaaaattggaatgac

SEQ ID NO: 11923 - DNA, 15 bp, synthetic construct
  source 1..15: mol_type = other DNA
gtttactcttagtga

SEQ ID NO: 11924 - DNA, 15 bp, synthetic construct
  source 1..15: mol_type = other DNA
ggcaatttatacaga

SEQ ID NO: 11925 - DNA, 15 bp, synthetic construct
  source 1..15: mol_type = other DNA
cttggcattttccgt

SEQ ID NO: 11926 - DNA, 30 bp, synthetic construct
  source 1..30: mol_type = other DNA
ctctctctctgacaacttggcattttccgt

SEQ ID NO: 11927 - DNA, 15 bp, synthetic construct
  source 1..15: mol_type = other DNA
ttatttatggtccta

SEQ ID NO: 11928 - DNA, 15 bp, synthetic construct
  source 1..15: mol_type = other DNA
caaagtttcttaaat

SEQ ID NO: 11929 - DNA, 15 bp, synthetic construct
  source 1..15: mol_type = other DNA
ctctctggatagggc

SEQ ID NO: 11930 - DNA, 15 bp, synthetic construct
  source 1..15: mol_type = other DNA
agactggatatccaa

SEQ ID NO: 11931 - DNA, 15 bp, synthetic construct
  source 1..15: mol_type = other DNA
ttgtgtccaatgtga

SEQ ID NO: 11932 - DNA, 15 bp, synthetic construct
  source 1..15: mol_type = other DNA
gagaaggaagcaagg

SEQ ID NO: 11933 - DNA, 15 bp, synthetic construct
  source 1..15: mol_type = other DNA
ttcaagttgttcttt

SEQ ID NO: 11934 - DNA, 15 bp, synthetic construct
  source 1..15: mol_type = other DNA
gagccccaaaactat

SEQ ID NO: 11935 - DNA, 15 bp, synthetic construct
  source 1..15: mol_type = other DNA
caggttttgacagct

SEQ ID NO: 11936 - DNA, 15 bp, synthetic construct
  source 1..15: mol_type = other DNA
ctacagggcaaggta

SEQ ID NO: 11937 - DNA, 15 bp, synthetic construct
  source 1..15: mol_type = other DNA
tgtcccttgtttatt

SEQ ID NO: 11938 - DNA, 15 bp, synthetic construct
  source 1..15: mol_type = other DNA
gctgatagagattag

SEQ ID NO: 11939 - DNA, 15 bp, synthetic construct
  source 1..15: mol_type = other DNA
tgatgtatgttcgct

SEQ ID NO: 11940 - DNA, 15 bp, synthetic construct
  source 1..15: mol_type = other DNA
tcacaaagagacatt

SEQ ID NO: 11941 - DNA, 15 bp, synthetic construct
  source 1..15: mol_type = other DNA
tattagccagcatag

SEQ ID NO: 11942 - DNA, 15 bp, synthetic construct
  source 1..15: mol_type = other DNA
ttgaggttgtgactt

SEQ ID NO: 11943 - DNA, 15 bp, synthetic construct
  source 1..15: mol_type = other DNA
gggaagtctagaggt

SEQ ID NO: 11944 - DNA, 15 bp, synthetic construct
  source 1..15: mol_type = other DNA
cactctgctttaatg

SEQ ID NO: 11945 - DNA, 15 bp, synthetic construct
  source 1..15: mol_type = other DNA
gttcttatcactgtc

SEQ ID NO: 11946 - DNA, 15 bp, synthetic construct
  source 1..15: mol_type = other DNA
tggttaatgctcttg

SEQ ID NO: 11947 - DNA, 15 bp, synthetic construct
  source 1..15: mol_type = other DNA
ccaatggagagataa

SEQ ID NO: 11948 - DNA, 15 bp, synthetic construct
  source 1..15: mol_type = other DNA
aagtccctatccttc

SEQ ID NO: 11949 - DNA, 15 bp, synthetic construct
  source 1..15: mol_type = other DNA
atttcttgtgttggg

SEQ ID NO: 11950 - DNA, 15 bp, synthetic construct
  source 1..15: mol_type = other DNA
cttcagggttcatcc

SEQ ID NO: 11951 - DNA, 15 bp, synthetic construct
  source 1..15: mol_type = other DNA
agataggagcagaag

SEQ ID NO: 11952 - DNA, 15 bp, synthetic construct
  source 1..15: mol_type = other DNA
tatgatgcacataga

SEQ ID NO: 11953 - DNA, 15 bp, synthetic construct
  source 1..15: mol_type = other DNA
ctgcaataagaattc

SEQ ID NO: 11954 - DNA, 15 bp, synthetic construct
  source 1..15: mol_type = other DNA
tatctaaagcatgaa

SEQ ID NO: 11955 - DNA, 15 bp, synthetic construct
  source 1..15: mol_type = other DNA
tgccttcttatggtg

SEQ ID NO: 11956 - DNA, 15 bp, synthetic construct
  source 1..15: mol_type = other DNA
ttctcctaacaaggc

SEQ ID NO: 11957 - DNA, 15 bp, synthetic construct
  source 1..15: mol_type = other DNA
acacatccttggtag

SEQ ID NO: 11958 - DNA, 15 bp, synthetic construct
  source 1..15: mol_type = other DNA
aaagattacttatgg

SEQ ID NO: 11959 - DNA, 15 bp, synthetic construct
  source 1..15: mol_type = other DNA
tcaaaatccgatgtc

SEQ ID NO: 11960 - DNA, 15 bp, synthetic construct
  source 1..15: mol_type = other DNA
ataatccctttctca

SEQ ID NO: 11961 - DNA, 15 bp, synthetic construct
  source 1..15: mol_type = other DNA
gaaaaaggtacagga

SEQ ID NO: 11962 - DNA, 15 bp, synthetic construct
  source 1..15: mol_type = other DNA
gtttatacttagggt

SEQ ID NO: 11963 - DNA, 15 bp, synthetic construct
  source 1..15: mol_type = other DNA
agatcagactgcact

SEQ ID NO: 11964 - DNA, 15 bp, synthetic construct
  source 1..15: mol_type = other DNA
acctataaccacagt

SEQ ID NO: 11965 - DNA, 15 bp, synthetic construct
  source 1..15: mol_type = other DNA
cataatcattctgac

SEQ ID NO: 11966 - DNA, 15 bp, synthetic construct
  source 1..15: mol_type = other DNA
cccaacatacactcg

SEQ ID NO: 11967 - DNA, 15 bp, synthetic construct
  source 1..15: mol_type = other DNA
tgggctaaaaagtca

SEQ ID NO: 11968 - DNA, 15 bp, synthetic construct
  source 1..15: mol_type = other DNA
gacatgaacctaaag

SEQ ID NO: 11969 - DNA, 15 bp, synthetic construct
  source 1..15: mol_type = other DNA
cttgtttttcagtgt

SEQ ID NO: 11970 - DNA, 15 bp, synthetic construct
  source 1..15: mol_type = other DNA
atcccctaacccata

SEQ ID NO: 11971 - DNA, 15 bp, synthetic construct
  source 1..15: mol_type = other DNA
gaactgccccacgaa

SEQ ID NO: 11972 - DNA, 15 bp, synthetic construct
  source 1..15: mol_type = other DNA
actgccatggaatgt

SEQ ID NO: 11973 - DNA, 15 bp, synthetic construct
  source 1..15: mol_type = other DNA
gagcttcaattgaga

SEQ ID NO: 11974 - DNA, 15 bp, synthetic construct
  source 1..15: mol_type = other DNA
aggtcctatcatatc

SEQ ID NO: 11975 - DNA, 15 bp, synthetic construct
  source 1..15: mol_type = other DNA
actctgggtaaatgg

SEQ ID NO: 11976 - DNA, 15 bp, synthetic construct
  source 1..15: mol_type = other DNA
acactcaagaaaatg

SEQ ID NO: 11977 - DNA, 15 bp, synthetic construct
  source 1..15: mol_type = other DNA
agatccaaccagtcc

SEQ ID NO: 11978 - DNA, 15 bp, synthetic construct
  source 1..15: mol_type = other DNA
cctagaccctatatt

SEQ ID NO: 11979 - DNA, 15 bp, synthetic construct
  source 1..15: mol_type = other DNA
accccagctgagtcc

SEQ ID NO: 11980 - DNA, 15 bp, synthetic construct
  source 1..15: mol_type = other DNA
cctagtcacagttcg

SEQ ID NO: 11981 - DNA, 15 bp, synthetic construct
  source 1..15: mol_type = other DNA
cgaggatcagaatgg

SEQ ID NO: 11982 - DNA, 15 bp, synthetic construct
  source 1..15: mol_type = other DNA
gaaggtgggctaaac

SEQ ID NO: 11983 - DNA, 15 bp, synthetic construct
  source 1..15: mol_type = other DNA
aacagtctcattagc

SEQ ID NO: 11984 - DNA, 15 bp, synthetic construct
  source 1..15: mol_type = other DNA
cccaagtaatagggt

SEQ ID NO: 11985 - DNA, 15 bp, synthetic construct
  source 1..15: mol_type = other DNA
ctgtagaaagattgc

SEQ ID NO: 11986 - DNA, 15 bp, synthetic construct
  source 1..15: mol_type = other DNA
cctatgcagacaagg

SEQ ID NO: 11987 - DNA, 15 bp, synthetic construct
  source 1..15: mol_type = other DNA
acgtgaccagcctac

SEQ ID NO: 11988 - DNA, 15 bp, synthetic construct
  source 1..15: mol_type = other DNA
catatccaaccttga

SEQ ID NO: 11989 - DNA, 15 bp, synthetic construct
  source 1..15: mol_type = other DNA
aggttgctgaatctc

SEQ ID NO: 11990 - DNA, 15 bp, synthetic construct
  source 1..15: mol_type = other DNA
gacacactcccttgt

SEQ ID NO: 11991 - DNA, 15 bp, synthetic construct
  source 1..15: mol_type = other DNA
ctcaccgggtgctag

SEQ ID NO: 11992 - DNA, 15 bp, synthetic construct
  source 1..15: mol_type = other DNA
ccttcccttcctgag

SEQ ID NO: 11993 - DNA, 15 bp, synthetic construct
  source 1..15: mol_type = other DNA
tgtacttgctggctg

SEQ ID NO: 11994 - DNA, 15 bp, synthetic construct
  source 1..15: mol_type = other DNA
aagaaaggtcctagt

SEQ ID NO: 11995 - DNA, 15 bp, synthetic construct
  source 1..15: mol_type = other DNA
gagcagagctggagg

SEQ ID NO: 11996 - DNA, 15 bp, synthetic construct
  source 1..15: mol_type = other DNA
cttacacatctcgac

SEQ ID NO: 11997 - DNA, 15 bp, synthetic construct
  source 1..15: mol_type = other DNA
cattcgctcttggca

SEQ ID NO: 11998 - DNA, 15 bp, synthetic construct
  source 1..15: mol_type = other DNA
tatttaaaaggcaac

SEQ ID NO: 11999 - DNA, 15 bp, synthetic construct
  source 1..15: mol_type = other DNA
gaagcatgctagttg

SEQ ID NO: 12000 - DNA, 15 bp, synthetic construct
  source 1..15: mol_type = other DNA
attagggtgacaagc

SEQ ID NO: 12001 - DNA, 15 bp, synthetic construct
  source 1..15: mol_type = other DNA
ctcactgggcacctt

SEQ ID NO: 12002 - DNA, 15 bp, synthetic construct
  source 1..15: mol_type = other DNA
gtctgtccactcagg

SEQ ID NO: 12003 - DNA, 15 bp, synthetic construct
  source 1..15: mol_type = other DNA
tgtgttagctccagc

SEQ ID NO: 12004 - DNA, 15 bp, synthetic construct
  source 1..15: mol_type = other DNA
cctctaatagggtga

SEQ ID NO: 12005 - DNA, 15 bp, synthetic construct
  source 1..15: mol_type = other DNA
ggtgggttcactagc

SEQ ID NO: 12006 - DNA, 15 bp, synthetic construct
  source 1..15: mol_type = other DNA
cacgtgttttaaact

SEQ ID NO: 12007 - DNA, 15 bp, synthetic construct
  source 1..15: mol_type = other DNA
atgggatctaagtca

SEQ ID NO: 12008 - DNA, 15 bp, synthetic construct
  source 1..15: mol_type = other DNA
ctgttacgtatgtct

SEQ ID NO: 12009 - DNA, 15 bp, synthetic construct
  source 1..15: mol_type = other DNA
gcagtcacaacatgc

SEQ ID NO: 12010 - DNA, 15 bp, synthetic construct
  source 1..15: mol_type = other DNA
ctggttcatgtcact

SEQ ID NO: 12011 - DNA, 15 bp, synthetic construct
  source 1..15: mol_type = other DNA
tctttgtgctggagc

SEQ ID NO: 12012 - DNA, 15 bp, synthetic construct
  source 1..15: mol_type = other DNA
tgtactctgaattgg

SEQ ID NO: 12013 - DNA, 15 bp, synthetic construct
  source 1..15: mol_type = other DNA
agtctttacacacat

SEQ ID NO: 12014 - DNA, 15 bp, synthetic construct
  source 1..15: mol_type = other DNA
ggcaaagtgtagaaa

SEQ ID NO: 12015 - DNA, 15 bp, synthetic construct
  source 1..15: mol_type = other DNA
catgtacttagtaga

SEQ ID NO: 12016 - DNA, 15 bp, synthetic construct
  source 1..15: mol_type = other DNA
agcacttcaactaca

SEQ ID NO: 12017 - DNA, 15 bp, synthetic construct
  source 1..15: mol_type = other DNA
gacacacgtgtgaac

SEQ ID NO: 12018 - DNA, 15 bp, synthetic construct
  source 1..15: mol_type = other DNA
ctgtaccactacctc

SEQ ID NO: 12019 - DNA, 15 bp, synthetic construct
  source 1..15: mol_type = other DNA
tggtgaacacttgga

SEQ ID NO: 12020 - DNA, 15 bp, synthetic construct
  source 1..15: mol_type = other DNA
agcagaccatcgtac

SEQ ID NO: 12021 - DNA, 15 bp, synthetic construct
  source 1..15: mol_type = other DNA
tgcatagtggctttg

SEQ ID NO: 12022 - DNA, 15 bp, synthetic construct
  source 1..15: mol_type = other DNA
ggagatttgctagat

SEQ ID NO: 12023 - DNA, 15 bp, synthetic construct
  source 1..15: mol_type = other DNA
ggtatgttctggaga

SEQ ID NO: 12024 - DNA, 15 bp, synthetic construct
  source 1..15: mol_type = other DNA
gtagggataagatgg

SEQ ID NO: 12025 - DNA, 15 bp, synthetic construct
  source 1..15: mol_type = other DNA
ccctattgaacactg

SEQ ID NO: 12026 - DNA, 15 bp, synthetic construct
  source 1..15: mol_type = other DNA
tttcctcttcaactg

SEQ ID NO: 12027 - DNA, 15 bp, synthetic construct
  source 1..15: mol_type = other DNA
gagactgggcagagt

SEQ ID NO: 12028 - DNA, 15 bp, synthetic construct
  source 1..15: mol_type = other DNA
tgtcttttgtaaagc

SEQ ID NO: 12029 - DNA, 15 bp, synthetic construct
  source 1..15: mol_type = other DNA
tgccaagtataaaag

SEQ ID NO: 12030 - DNA, 15 bp, synthetic construct
  source 1..15: mol_type = other DNA
tctcttaaagtaaat

SEQ ID NO: 12031 - DNA, 15 bp, synthetic construct
  source 1..15: mol_type = other DNA
tctccgttttcagtg

SEQ ID NO: 12032 - DNA, 15 bp, synthetic construct
  source 1..15: mol_type = other DNA
gtgtaccatttctca

SEQ ID NO: 12033 - DNA, 15 bp, synthetic construct
  source 1..15: mol_type = other DNA
aagtgtatactcagg

SEQ ID NO: 12034 - DNA, 15 bp, synthetic construct
  source 1..15: mol_type = other DNA
cacctaaggaaaatg

SEQ ID NO: 12035 - DNA, 15 bp, synthetic construct
  source 1..15: mol_type = other DNA
tcataccctttggac

SEQ ID NO: 12036 - DNA, 15 bp, synthetic construct
  source 1..15: mol_type = other DNA
agaggttatttcaga

SEQ ID NO: 12037 - DNA, 15 bp, synthetic construct
  source 1..15: mol_type = other DNA
tcagctgtgtcagtc

SEQ ID NO: 12038 - DNA, 15 bp, synthetic construct
  source 1..15: mol_type = other DNA
tggacaaatatatgg

SEQ ID NO: 12039 - DNA, 15 bp, synthetic construct
  source 1..15: mol_type = other DNA
atcgggattttgaca

SEQ ID NO: 12040 - DNA, 15 bp, synthetic construct
  source 1..15: mol_type = other DNA
ctacacagataagtg

SEQ ID NO: 12041 - DNA, 15 bp, synthetic construct
  source 1..15: mol_type = other DNA
ccagagctcagttat

SEQ ID NO: 12042 - DNA, 15 bp, synthetic construct
  source 1..15: mol_type = other DNA
tccctgacattatta

SEQ ID NO: 12043 - DNA, 15 bp, synthetic construct
  source 1..15: mol_type = other DNA
ctcttgagttagaca

SEQ ID NO: 12044 - DNA, 15 bp, synthetic construct
  source 1..15: mol_type = other DNA
tatttgctcttttgt

SEQ ID NO: 12045 - DNA, 15 bp, synthetic construct
  source 1..15: mol_type = other DNA
ccatttcgtatacat

SEQ ID NO: 12046 - DNA, 15 bp, synthetic construct
  source 1..15: mol_type = other DNA
atgaaaccattttgg

SEQ ID NO: 12047 - DNA, 15 bp, synthetic construct
  source 1..15: mol_type = other DNA
tagagctagagtgct

SEQ ID NO: 12048 - DNA, 15 bp, synthetic construct
  source 1..15: mol_type = other DNA
agtagtggaattagg

SEQ ID NO: 12049 - DNA, 15 bp, synthetic construct
  source 1..15: mol_type = other DNA
ccatagccaaagaca

SEQ ID NO: 12050 - DNA, 15 bp, synthetic construct
  source 1..15: mol_type = other DNA
aggtatagcaataca

SEQ ID NO: 12051 - DNA, 15 bp, synthetic construct
  source 1..15: mol_type = other DNA
aaaagtgcctgtcct

SEQ ID NO: 12052 - DNA, 15 bp, synthetic construct
  source 1..15: mol_type = other DNA
caagaatacagagaa

SEQ ID NO: 12053 - DNA, 15 bp, synthetic construct
  source 1..15: mol_type = other DNA
gatcccagattagat

SEQ ID NO: 12054 - DNA, 15 bp, synthetic construct
  source 1..15: mol_type = other DNA
aagtttatatgaaaa

SEQ ID NO: 12055 - DNA, 15 bp, synthetic construct
  source 1..15: mol_type = other DNA
tgagggctagaggag

SEQ ID NO: 12056 - DNA, 15 bp, synthetic construct
  source 1..15: mol_type = other DNA
catggtggcagatgt

SEQ ID NO: 12057 - DNA, 15 bp, synthetic construct
  source 1..15: mol_type = other DNA
ttgtcacctaggcgg

SEQ ID NO: 12058 - DNA, 15 bp, synthetic construct
  source 1..15: mol_type = other DNA
gaggccaggtgcatt

SEQ ID NO: 12059 - DNA, 15 bp, synthetic construct
  source 1..15: mol_type = other DNA
acctggcctcagctt

SEQ ID NO: 12060 - DNA, 15 bp, synthetic construct
  source 1..15: mol_type = other DNA
tatttgtggctggaa

SEQ ID NO: 12061 - DNA, 15 bp, synthetic construct
  source 1..15: mol_type = other DNA
gtatattcatatccc

SEQ ID NO: 12062 - DNA, 15 bp, synthetic construct
  source 1..15: mol_type = other DNA
agaatgtccaaaatc

SEQ ID NO: 12063 - DNA, 15 bp, synthetic construct
  source 1..15: mol_type = other DNA
cacatgttcaaatcc

SEQ ID NO: 12064 - DNA, 15 bp, synthetic construct
  source 1..15: mol_type = other DNA
aaggagtatgtaaga

SEQ ID NO: 12065 - DNA, 15 bp, synthetic construct
  source 1..15: mol_type = other DNA
aggaggactactgat

SEQ ID NO: 12066 - DNA, 15 bp, synthetic construct
  source 1..15: mol_type = other DNA
attcttgaagagtta

SEQ ID NO: 12067 - DNA, 15 bp, synthetic construct
  source 1..15: mol_type = other DNA
attgatagtctcact

SEQ ID NO: 12068 - DNA, 15 bp, synthetic construct
  source 1..15: mol_type = other DNA
aaggatacacacaat

SEQ ID NO: 12069 - DNA, 15 bp, synthetic construct
  source 1..15: mol_type = other DNA
cctttttgggatcgg

SEQ ID NO: 12070 - DNA, 15 bp, synthetic construct
  source 1..15: mol_type = other DNA
aaagtctctttttgg

SEQ ID NO: 12071 - DNA, 15 bp, synthetic construct
  source 1..15: mol_type = other DNA
gtgaaataggtatgt

SEQ ID NO: 12072 - DNA, 15 bp, synthetic construct
  source 1..15: mol_type = other DNA
tcctgcttccttcta

SEQ ID NO: 12073 - DNA, 15 bp, synthetic construct
  source 1..15: mol_type = other DNA
agtgtttgtgttcta

SEQ ID NO: 12074 - DNA, 15 bp, synthetic construct
  source 1..15: mol_type = other DNA
tggtcccaaaatccc

SEQ ID NO: 12075 - DNA, 15 bp, synthetic construct
  source 1..15: mol_type = other DNA
gtcttttccttgtag

SEQ ID NO: 12076 - DNA, 15 bp, synthetic construct
  source 1..15: mol_type = other DNA
aaacttcctgaaaag

SEQ ID NO: 12077 - DNA, 15 bp, synthetic construct
  source 1..15: mol_type = other DNA
aaactggtccaggtt

SEQ ID NO: 12078 - DNA, 15 bp, synthetic construct
  source 1..15: mol_type = other DNA
tcagtgcccacaata

SEQ ID NO: 12079 - DNA, 15 bp, synthetic construct
  source 1..15: mol_type = other DNA
ctgttcctctattca

SEQ ID NO: 12080 - DNA, 15 bp, synthetic construct
  source 1..15: mol_type = other DNA
taagtagtagtatca

SEQ ID NO: 12081 - DNA, 15 bp, synthetic construct
  source 1..15: mol_type = other DNA
tttaggctgaagaat

SEQ ID NO: 12082 - DNA, 15 bp, synthetic construct
  source 1..15: mol_type = other DNA
agagcttgatatgtt

SEQ ID NO: 12083 - DNA, 15 bp, synthetic construct
  source 1..15: mol_type = other DNA
ctcatcaaatattct

SEQ ID NO: 12084 - DNA, 15 bp, synthetic construct
  source 1..15: mol_type = other DNA
gctccttgaatgtga

SEQ ID NO: 12085 - DNA, 15 bp, synthetic construct
  source 1..15: mol_type = other DNA
atgtgtaactgtgtg

SEQ ID NO: 12086 - DNA, 15 bp, synthetic construct
  source 1..15: mol_type = other DNA
cagcatagccttatg

SEQ ID NO: 12087 - DNA, 15 bp, synthetic construct
  source 1..15: mol_type = other DNA
tccatatggagcctg

SEQ ID NO: 12088 - DNA, 15 bp, synthetic construct
  source 1..15: mol_type = other DNA
cttctatggacaata

SEQ ID NO: 12089 - DNA, 15 bp, synthetic construct
  source 1..15: mol_type = other DNA
gagagctcttcttca

SEQ ID NO: 12090 - DNA, 15 bp, synthetic construct
  source 1..15: mol_type = other DNA
caaaactgagatggt

SEQ ID NO: 12091 - DNA, 15 bp, synthetic construct
  source 1..15: mol_type = other DNA
gtgacttgcagtgat

SEQ ID NO: 12092 - DNA, 15 bp, synthetic construct
  source 1..15: mol_type = other DNA
aagaagtgggagaag

SEQ ID NO: 12093 - DNA, 15 bp, synthetic construct
  source 1..15: mol_type = other DNA
tgcattcagacatct

SEQ ID NO: 12094 - DNA, 15 bp, synthetic construct
  source 1..15: mol_type = other DNA
gtatctcacctctag

SEQ ID NO: 12095 - DNA, 15 bp, synthetic construct
  source 1..15: mol_type = other DNA
aatgggtattagcat

SEQ ID NO: 12096 - DNA, 15 bp, synthetic construct
  source 1..15: mol_type = other DNA
gccattggacaaacc

SEQ ID NO: 12097 - DNA, 15 bp, synthetic construct
  source 1..15: mol_type = other DNA
gcaatggcgttttag

SEQ ID NO: 12098 - DNA, 15 bp, synthetic construct
  source 1..15: mol_type = other DNA
actaagctctatgct

SEQ ID NO: 12099 - DNA, 15 bp, synthetic construct
  source 1..15: mol_type = other DNA
actggaaaaatgtag

SEQ ID NO: 12100 - DNA, 15 bp, synthetic construct
  source 1..15: mol_type = other DNA
ttcacagttgtattg

SEQ ID NO: 12101 - DNA, 15 bp, synthetic construct
  source 1..15: mol_type = other DNA
atcccttactttccc

SEQ ID NO: 12102 - DNA, 15 bp, synthetic construct
  source 1..15: mol_type = other DNA
agagatgtagcagtg

SEQ ID NO: 12103 - DNA, 15 bp, synthetic construct
  source 1..15: mol_type = other DNA
tttgttggattcccc

SEQ ID NO: 12104 - DNA, 15 bp, synthetic construct
  source 1..15: mol_type = other DNA
tgaattatttactct

SEQ ID NO: 12105 - DNA, 15 bp, synthetic construct
  source 1..15: mol_type = other DNA
tcagctaacttcatc

SEQ ID NO: 12106 - DNA, 15 bp, synthetic construct
  source 1..15: mol_type = other DNA
actccccttttgtta

SEQ ID NO: 12107 - DNA, 15 bp, synthetic construct
  source 1..15: mol_type = other DNA
cctacccagtacctt

SEQ ID NO: 12108 - DNA, 15 bp, synthetic construct
  source 1..15: mol_type = other DNA
ctcagccagaaagtt

SEQ ID NO: 12109 - DNA, 15 bp, synthetic construct
  source 1..15: mol_type = other DNA
acctctttcatttga

SEQ ID NO: 12110 - DNA, 15 bp, synthetic construct
  source 1..15: mol_type = other DNA
ctgcacatccaacaa

SEQ ID NO: 12111 - DNA, 15 bp, synthetic construct
  source 1..15: mol_type = other DNA
ctaagccttccttga

SEQ ID NO: 12112 - DNA, 15 bp, synthetic construct
  source 1..15: mol_type = other DNA
gtctcagcagactcc

SEQ ID NO: 12113 - DNA, 15 bp, synthetic construct
  source 1..15: mol_type = other DNA
gcctcctgttattgg

SEQ ID NO: 12114 - DNA, 15 bp, synthetic construct
  source 1..15: mol_type = other DNA
aatctgtaattctca

SEQ ID NO: 12115 - DNA, 15 bp, synthetic construct
  source 1..15: mol_type = other DNA
atgtatgggacagcc

SEQ ID NO: 12116 - DNA, 15 bp, synthetic construct
  source 1..15: mol_type = other DNA
ctctgtgtgcatgtt

SEQ ID NO: 12117 - DNA, 15 bp, synthetic construct
  source 1..15: mol_type = other DNA
cagtcctcccattac

SEQ ID NO: 12118 - DNA, 15 bp, synthetic construct
  source 1..15: mol_type = other DNA
agggcttctcgttca

SEQ ID NO: 12119 - DNA, 15 bp, synthetic construct
  source 1..15: mol_type = other DNA
tccatgggtctcctt

SEQ ID NO: 12120 - DNA, 15 bp, synthetic construct
  source 1..15: mol_type = other DNA
gagtggaatggcaac

SEQ ID NO: 12121 - DNA, 15 bp, synthetic construct
  source 1..15: mol_type = other DNA
atgacaggaagctag

SEQ ID NO: 12122 - DNA, 15 bp, synthetic construct
  source 1..15: mol_type = other DNA
acagcctcgttctag

SEQ ID NO: 12123 - DNA, 15 bp, synthetic construct
  source 1..15: mol_type = other DNA
agtccgccgaaatgg

SEQ ID NO: 12124 - DNA, 15 bp, synthetic construct
  source 1..15: mol_type = other DNA
tacaggcctcatccg

SEQ ID NO: 12125 - DNA, 15 bp, synthetic construct
  source 1..15: mol_type = other DNA
agaccacaactagac

SEQ ID NO: 12126 - DNA, 15 bp, synthetic construct
  source 1..15: mol_type = other DNA
tgccatcaactcagg

SEQ ID NO: 12127 - DNA, 15 bp, synthetic construct
  source 1..15: mol_type = other DNA
ccacaccaagaagag

SEQ ID NO: 12128 - DNA, 15 bp, synthetic construct
  source 1..15: mol_type = other DNA
gtgtgctatcccaag

SEQ ID NO: 12129 - DNA, 15 bp, synthetic construct
  source 1..15: mol_type = other DNA
gcctactcatcctgc

SEQ ID NO: 12130 - DNA, 15 bp, synthetic construct
  source 1..15: mol_type = other DNA
ataggtatccacaat

SEQ ID NO: 12131 - DNA, 15 bp, synthetic construct
  source 1..15: mol_type = other DNA
cttgggcttatcagc

SEQ ID NO: 12132 - DNA, 15 bp, synthetic construct
  source 1..15: mol_type = other DNA
gtgaaaagtgctagt

SEQ ID NO: 12133 - DNA, 15 bp, synthetic construct
  source 1..15: mol_type = other DNA
gctgtggtgactaga

SEQ ID NO: 12134 - DNA, 15 bp, synthetic construct
  source 1..15: mol_type = other DNA
gtgctgctctttagg

SEQ ID NO: 12135 - DNA, 15 bp, synthetic construct
  source 1..15: mol_type = other DNA
cctgtgatacactat

SEQ ID NO: 12136 - DNA, 15 bp, synthetic construct
  source 1..15: mol_type = other DNA
ccctaagctcttgct

SEQ ID NO: 12137 - DNA, 15 bp, synthetic construct
  source 1..15: mol_type = other DNA
gaggcaacccaatcc

SEQ ID NO: 12138 - DNA, 15 bp, synthetic construct
  source 1..15: mol_type = other DNA
tgtgtcaaggtgtac

SEQ ID NO: 12139 - DNA, 15 bp, synthetic construct
  source 1..15: mol_type = other DNA
gatgcaagatatcct

SEQ ID NO: 12140 - DNA, 15 bp, synthetic construct
  source 1..15: mol_type = other DNA
gctggctgagtgaaa

SEQ ID NO: 12141 - DNA, 15 bp, synthetic construct
  source 1..15: mol_type = other DNA
catcacactgttggg

SEQ ID NO: 12142 - DNA, 15 bp, synthetic construct
  source 1..15: mol_type = other DNA
tatggacagctgggt

SEQ ID NO: 12143 - DNA, 15 bp, synthetic construct
  source 1..15: mol_type = other DNA
ctgggaggtcagtag

SEQ ID NO: 12144 - DNA, 15 bp, synthetic construct
  source 1..15: mol_type = other DNA
aggtcccaattttta

SEQ ID NO: 12145 - DNA, 15 bp, synthetic construct
  source 1..15: mol_type = other DNA
atagggccatcccag

SEQ ID NO: 12146 - DNA, 15 bp, synthetic construct
  source 1..15: mol_type = other DNA
actggcttgaaatct

SEQ ID NO: 12147 - DNA, 15 bp, synthetic construct
  source 1..15: mol_type = other DNA
tcagtgttggaatgg

SEQ ID NO: 12148 - DNA, 15 bp, synthetic construct
  source 1..15: mol_type = other DNA
gtgcagcctcacaac

SEQ ID NO: 12149 - DNA, 15 bp, synthetic construct
  source 1..15: mol_type = other DNA
gtcccgcggaaatcc

SEQ ID NO: 12150 - DNA, 15 bp, synthetic construct
  source 1..15: mol_type = other DNA
cctcagcctgtatcc

SEQ ID NO: 12151 - DNA, 15 bp, synthetic construct
  source 1..15: mol_type = other DNA
agttggtgcttctag

SEQ ID NO: 12152 - DNA, 15 bp, synthetic construct
  source 1..15: mol_type = other DNA
gtgcttagattttcc

SEQ ID NO: 12153 - DNA, 15 bp, synthetic construct
  source 1..15: mol_type = other DNA
tgtagccactcatac

SEQ ID NO: 12154 - DNA, 15 bp, synthetic construct
  source 1..15: mol_type = other DNA
tctcctgtgaaatag

SEQ ID NO: 12155 - DNA, 15 bp, synthetic construct
  source 1..15: mol_type = other DNA
atcctttgctgatcc

SEQ ID NO: 12156 - DNA, 15 bp, synthetic construct
  source 1..15: mol_type = other DNA
gaggcaggtccagag

SEQ ID NO: 12157 - DNA, 15 bp, synthetic construct
  source 1..15: mol_type = other DNA
tgtcaaggttccaca

SEQ ID NO: 12158 - DNA, 15 bp, synthetic construct
  source 1..15: mol_type = other DNA
gtatataggtgtggt

SEQ ID NO: 12159 - DNA, 15 bp, synthetic construct
  source 1..15: mol_type = other DNA
gcagtttccacctat

SEQ ID NO: 12160 - DNA, 15 bp, synthetic construct
  source 1..15: mol_type = other DNA
cagatcagaccccta

SEQ ID NO: 12161 - DNA, 15 bp, synthetic construct
  source 1..15: mol_type = other DNA
tcatgcagcaaggtc

SEQ ID NO: 12162 - DNA, 15 bp, synthetic construct
  source 1..15: mol_type = other DNA
aggctttcacaccag

SEQ ID NO: 12163 - DNA, 15 bp, synthetic construct
  source 1..15: mol_type = other DNA
ctggaagttgggtag

SEQ ID NO: 12164 - DNA, 15 bp, synthetic construct
  source 1..15: mol_type = other DNA
ggcctcaagctctgc

SEQ ID NO: 12165 - DNA, 15 bp, synthetic construct
  source 1..15: mol_type = other DNA
taagactcaatgcca

SEQ ID NO: 12166 - DNA, 15 bp, synthetic construct
  source 1..15: mol_type = other DNA
gttcttcctgtgcaa

SEQ ID NO: 12167 - DNA, 15 bp, synthetic construct
  source 1..15: mol_type = other DNA
tttatggtccctgtc

SEQ ID NO: 12168 - DNA, 15 bp, synthetic construct
  source 1..15: mol_type = other DNA
aggaacccatcagtc

SEQ ID NO: 12169 - DNA, 15 bp, synthetic construct
  source 1..15: mol_type = other DNA
cttagtctcatttgt

SEQ ID NO: 12170 - DNA, 15 bp, synthetic construct
  source 1..15: mol_type = other DNA
gcaaaggtcttccaa

SEQ ID NO: 12171 - DNA, 15 bp, synthetic construct
  source 1..15: mol_type = other DNA
cacccaacgatgaca

SEQ ID NO: 12172 - DNA, 15 bp, synthetic construct
  source 1..15: mol_type = other DNA
agcccagtctctgga

SEQ ID NO: 12173 - DNA, 15 bp, synthetic construct
  source 1..15: mol_type = other DNA
gacaatcgctcttcc

SEQ ID NO: 12174 - DNA, 15 bp, synthetic construct
  source 1..15: mol_type = other DNA
acttgacatcattta

SEQ ID NO: 12175 - DNA, 15 bp, synthetic construct
  source 1..15: mol_type = other DNA
atatgtgtagtgtct

SEQ ID NO: 12176 - DNA, 15 bp, synthetic construct
  source 1..15: mol_type = other DNA
tttctttgtgatagg

SEQ ID NO: 12177 - DNA, 15 bp, synthetic construct
  source 1..15: mol_type = other DNA
taagataagagcaga

SEQ ID NO: 12178 - DNA, 15 bp, synthetic construct
  source 1..15: mol_type = other DNA
agagacagcccctat

SEQ ID NO: 12179 - DNA, 15 bp, synthetic construct
  source 1..15: mol_type = other DNA
agaagtaacatgtca

SEQ ID NO: 12180 - DNA, 15 bp, synthetic construct
  source 1..15: mol_type = other DNA
agggatttgggatca

SEQ ID NO: 12181 - DNA, 15 bp, synthetic construct
  source 1..15: mol_type = other DNA
gatcccagtggttga

SEQ ID NO: 12182 - DNA, 15 bp, synthetic construct
  source 1..15: mol_type = other DNA
acacatacccgtgac

SEQ ID NO: 12183 - DNA, 15 bp, synthetic construct
  source 1..15: mol_type = other DNA
gttaggaacaggtac

SEQ ID NO: 12184 - DNA, 15 bp, synthetic construct
  source 1..15: mol_type = other DNA
gcaggcatctagaac

SEQ ID NO: 12185 - DNA, 15 bp, synthetic construct
  source 1..15: mol_type = other DNA
ggtatcaggatatgc

SEQ ID NO: 12186 - DNA, 15 bp, synthetic construct
  source 1..15: mol_type = other DNA
tccttcctgattagt

SEQ ID NO: 12187 - DNA, 15 bp, synthetic construct
  source 1..15: mol_type = other DNA
cttgagtctcggaag

SEQ ID NO: 12188 - DNA, 15 bp, synthetic construct
  source 1..15: mol_type = other DNA
ccttgaataggctga

SEQ ID NO: 12189 - DNA, 15 bp, synthetic construct
  source 1..15: mol_type = other DNA
gacagcctctttgtt

SEQ ID NO: 12190 - DNA, 15 bp, synthetic construct
  source 1..15: mol_type = other DNA
tgtggcggtaaagag

SEQ ID NO: 12191 - DNA, 15 bp, synthetic construct
  source 1..15: mol_type = other DNA
tacctcagcaaggac

SEQ ID NO: 12192 - DNA, 15 bp, synthetic construct
  source 1..15: mol_type = other DNA
ttgtgattctctgat

SEQ ID NO: 12193 - DNA, 15 bp, synthetic construct
  source 1..15: mol_type = other DNA
cactagggccatttg

SEQ ID NO: 12194 - DNA, 15 bp, synthetic construct
  source 1..15: mol_type = other DNA
acagcttagggaaat

SEQ ID NO: 12195 - DNA, 15 bp, synthetic construct
  source 1..15: mol_type = other DNA
gtgcctttctctatg

SEQ ID NO: 12196 - DNA, 15 bp, synthetic construct
  source 1..15: mol_type = other DNA
ggtgtatcggaaatg

SEQ ID NO: 12197 - DNA, 15 bp, synthetic construct
  source 1..15: mol_type = other DNA
cacccatcctttcag

SEQ ID NO: 12198 - DNA, 15 bp, synthetic construct
  source 1..15: mol_type = other DNA
tagataattgattgg

SEQ ID NO: 12199 - DNA, 15 bp, synthetic construct
  source 1..15: mol_type = other DNA
tggcattctcacatc

SEQ ID NO: 12200 - DNA, 15 bp, synthetic construct
  source 1..15: mol_type = other DNA
acccactggaactag

SEQ ID NO: 12201 - DNA, 15 bp, synthetic construct
  source 1..15: mol_type = other DNA
cttggcttctttcca

SEQ ID NO: 12202 - DNA, 15 bp, synthetic construct
  source 1..15: mol_type = other DNA
gggatttgataggag

SEQ ID NO: 12203 - DNA, 15 bp, synthetic construct
  source 1..15: mol_type = other DNA
gtccttcaacattag

SEQ ID NO: 12204 - DNA, 15 bp, synthetic construct
  source 1..15: mol_type = other DNA
catgctacagttgat

SEQ ID NO: 12205 - DNA, 15 bp, synthetic construct
  source 1..15: mol_type = other DNA
tgttagacataattc

SEQ ID NO: 12206 - DNA, 15 bp, synthetic construct
  source 1..15: mol_type = other DNA
gtaaggagccattcc

SEQ ID NO: 12207 - DNA, 15 bp, synthetic construct
  source 1..15: mol_type = other DNA
atgaggcccactgaa

SEQ ID NO: 12208 - DNA, 15 bp, synthetic construct
  source 1..15: mol_type = other DNA
gaaaagggtctgact

SEQ ID NO: 12209 - DNA, 15 bp, synthetic construct
  source 1..15: mol_type = other DNA
cactcatgaatatct

SEQ ID NO: 12210 - DNA, 15 bp, synthetic construct
  source 1..15: mol_type = other DNA
tattcccagcttagg

SEQ ID NO: 12211 - DNA, 15 bp, synthetic construct
  source 1..15: mol_type = other DNA
accaggcttaacaac

SEQ ID NO: 12212 - DNA, 15 bp, synthetic construct
  source 1..15: mol_type = other DNA
atggatctaaaaggc

SEQ ID NO: 12213 - DNA, 15 bp, synthetic construct
  source 1..15: mol_type = other DNA
ccccattctctaatg

SEQ ID NO: 12214 - DNA, 15 bp, synthetic construct
  source 1..15: mol_type = other DNA
ctgcggaactaaaag

SEQ ID NO: 12215 - DNA, 15 bp, synthetic construct
  source 1..15: mol_type = other DNA
ttcttccataaatga

SEQ ID NO: 12216 - DNA, 15 bp, synthetic construct
  source 1..15: mol_type = other DNA
cggtgcctttatcag

SEQ ID NO: 12217 - DNA, 15 bp, synthetic construct
  source 1..15: mol_type = other DNA
aaccctgggttatac

SEQ ID NO: 12218 - DNA, 15 bp, synthetic construct
  source 1..15: mol_type = other DNA
ttagtgcagactgat

SEQ ID NO: 12219 - DNA, 15 bp, synthetic construct
  source 1..15: mol_type = other DNA
acctggatccggtat

SEQ ID NO: 12220 - DNA, 15 bp, synthetic construct
  source 1..15: mol_type = other DNA
agtaccctcttccct

SEQ ID NO: 12221 - DNA, 15 bp, synthetic construct
  source 1..15: mol_type = other DNA
tgccaaacaaattat

SEQ ID NO: 12222 - DNA, 15 bp, synthetic construct
  source 1..15: mol_type = other DNA
tagccaaaaatatct

SEQ ID NO: 12223 - DNA, 15 bp, synthetic construct
  source 1..15: mol_type = other DNA
tggttgtcatctgcg

SEQ ID NO: 12224 - DNA, 15 bp, synthetic construct
  source 1..15: mol_type = other DNA
actcagtgagaaagc

SEQ ID NO: 12225 - DNA, 15 bp, synthetic construct
  source 1..15: mol_type = other DNA
tgtcccaagcattac

SEQ ID NO: 12226 - DNA, 15 bp, synthetic construct
  source 1..15: mol_type = other DNA
gctgcctatctcttc

SEQ ID NO: 12227 - DNA, 15 bp, synthetic construct
  source 1..15: mol_type = other DNA
aatctgtgacacacc

SEQ ID NO: 12228 - DNA, 15 bp, synthetic construct
  source 1..15: mol_type = other DNA
tgacaattccttctt

SEQ ID NO: 12229 - DNA, 15 bp, synthetic construct
  source 1..15: mol_type = other DNA
atttcctgtgagatt

SEQ ID NO: 12230 - DNA, 15 bp, synthetic construct
  source 1..15: mol_type = other DNA
tagtggcttctattt

SEQ ID NO: 12231 - DNA, 15 bp, synthetic construct
  source 1..15: mol_type = other DNA
cagatcttgtaaaaa

SEQ ID NO: 12232 - DNA, 15 bp, synthetic construct
  source 1..15: mol_type = other DNA
atagaggctagagat

SEQ ID NO: 12233 - DNA, 15 bp, synthetic construct
  source 1..15: mol_type = other DNA
tcaccgctctcttcc

SEQ ID NO: 12234 - DNA, 15 bp, synthetic construct
  source 1..15: mol_type = other DNA
tagagacgcgtggaa

SEQ ID NO: 12235 - DNA, 15 bp, synthetic construct
  source 1..15: mol_type = other DNA
ctgaggccctctttc

SEQ ID NO: 12236 - DNA, 15 bp, synthetic construct
  source 1..15: mol_type = other DNA
acttcttcctcaaat

SEQ ID NO: 12237 - DNA, 15 bp, synthetic construct
  source 1..15: mol_type = other DNA
ttacttaggagggaa

SEQ ID NO: 12238 - DNA, 15 bp, synthetic construct
  source 1..15: mol_type = other DNA
ggttaacaaacagat

SEQ ID NO: 12239 - DNA, 15 bp, synthetic construct
  source 1..15: mol_type = other DNA
aagaatagctgttgc

SEQ ID NO: 12240 - DNA, 15 bp, synthetic construct
  source 1..15: mol_type = other DNA
atttgcgtttttcac

SEQ ID NO: 12241 - DNA, 15 bp, synthetic construct
  source 1..15: mol_type = other DNA
aaagttacattcatg

SEQ ID NO: 12242 - DNA, 15 bp, synthetic construct
  source 1..15: mol_type = other DNA
gtagttgccatttgt

SEQ ID NO: 12243 - DNA, 15 bp, synthetic construct
  source 1..15: mol_type = other DNA
agattattcattttt

SEQ ID NO: 12244 - DNA, 15 bp, synthetic construct
  source 1..15: mol_type = other DNA
ctcagaggtaactcc

SEQ ID NO: 12245 - DNA, 15 bp, synthetic construct
  source 1..15: mol_type = other DNA
tccccttcctctaga

SEQ ID NO: 12246 - DNA, 15 bp, synthetic construct
  source 1..15: mol_type = other DNA
caaatctgttaagtt

SEQ ID NO: 12247 - DNA, 15 bp, synthetic construct
  source 1..15: mol_type = other DNA
ctctccttttcaaaa

SEQ ID NO: 12248 - DNA, 15 bp, synthetic construct
  source 1..15: mol_type = other DNA
gggagatctttccat

SEQ ID NO: 12249 - DNA, 15 bp, synthetic construct
  source 1..15: mol_type = other DNA
aatgccaagttgccc

SEQ ID NO: 12250 - DNA, 15 bp, synthetic construct
  source 1..15: mol_type = other DNA
agatcagtgtactca

SEQ ID NO: 12251 - DNA, 15 bp, synthetic construct
  source 1..15: mol_type = other DNA
gaaatgtggtttgtt

SEQ ID NO: 12252 - DNA, 15 bp, synthetic construct
  source 1..15: mol_type = other DNA
ctttatctttgtgag

SEQ ID NO: 12253 - DNA, 15 bp, synthetic construct
  source 1..15: mol_type = other DNA
aaggtcaaaaacatt

SEQ ID NO: 12254 - DNA, 15 bp, synthetic construct
  source 1..15: mol_type = other DNA
ttggtgttacgactt

SEQ ID NO: 12255 - DNA, 15 bp, synthetic construct
  source 1..15: mol_type = other DNA
gaaaagccctttggg

SEQ ID NO: 12256 - DNA, 15 bp, synthetic construct
  source 1..15: mol_type = other DNA
ggagtaggccaagga

SEQ ID NO: 12257 - DNA, 15 bp, synthetic construct
  source 1..15: mol_type = other DNA
tcttgtattagggta

SEQ ID NO: 12258 - DNA, 15 bp, synthetic construct
  source 1..15: mol_type = other DNA
atatggttccctcaa

SEQ ID NO: 12259 - DNA, 15 bp, synthetic construct
  source 1..15: mol_type = other DNA
actttatcacatcat

SEQ ID NO: 12260 - DNA, 15 bp, synthetic construct
  source 1..15: mol_type = other DNA
aagcacaagaaaact

SEQ ID NO: 12261 - DNA, 15 bp, synthetic construct
  source 1..15: mol_type = other DNA
aacttctgcatctac

SEQ ID NO: 12262 - DNA, 15 bp, synthetic construct
  source 1..15: mol_type = other DNA
aaatgatccatttct

SEQ ID NO: 12263 - DNA, 15 bp, synthetic construct
  source 1..15: mol_type = other DNA
caagcaactcaatcc

SEQ ID NO: 12264 - DNA, 15 bp, synthetic construct
  source 1..15: mol_type = other DNA
actgtggtgcccctt

SEQ ID NO: 12265 - DNA, 15 bp, synthetic construct
  source 1..15: mol_type = other DNA
tgactgagtaaggct

SEQ ID NO: 12266 - DNA, 15 bp, synthetic construct
  source 1..15: mol_type = other DNA
taagagtgccttccc

SEQ ID NO: 12267 - DNA, 15 bp, synthetic construct
  source 1..15: mol_type = other DNA
aatgcacatcaaatg

SEQ ID NO: 12268 - DNA, 15 bp, synthetic construct
  source 1..15: mol_type = other DNA
gagttgatcagatgc

SEQ ID NO: 12269 - DNA, 15 bp, synthetic construct
  source 1..15: mol_type = other DNA
cctactacccagact

SEQ ID NO: 12270 - DNA, 15 bp, synthetic construct
  source 1..15: mol_type = other DNA
gaggttctgaatggg

SEQ ID NO: 12271 - DNA, 15 bp, synthetic construct
  source 1..15: mol_type = other DNA
cctctaaccccaatc

SEQ ID NO: 12272 - DNA, 15 bp, synthetic construct
  source 1..15: mol_type = other DNA
ggatctgagtagttg

SEQ ID NO: 12273 - DNA, 15 bp, synthetic construct
  source 1..15: mol_type = other DNA
ctacctaaaaccacc

SEQ ID NO: 12274 - DNA, 15 bp, synthetic construct
  source 1..15: mol_type = other DNA
gggaatccatgttgt

SEQ ID NO: 12275 - DNA, 15 bp, synthetic construct
  source 1..15: mol_type = other DNA
ccctagacccgaatt

SEQ ID NO: 12276 - DNA, 15 bp, synthetic construct
  source 1..15: mol_type = other DNA
tctatagttctcatg

SEQ ID NO: 12277 - DNA, 15 bp, synthetic construct
  source 1..15: mol_type = other DNA
ccaatcccaattcag

SEQ ID NO: 12278 - DNA, 15 bp, synthetic construct
  source 1..15: mol_type = other DNA
tttgaacacggtcag

SEQ ID NO: 12279 - DNA, 15 bp, synthetic construct
  source 1..15: mol_type = other DNA
cgccagtgatcaccc

SEQ ID NO: 12280 - DNA, 15 bp, synthetic construct
  source 1..15: mol_type = other DNA
tcgccgcggttctgt

SEQ ID NO: 12281 - DNA, 15 bp, synthetic construct
  source 1..15: mol_type = other DNA
atgctgaggagcccc

SEQ ID NO: 12282 - DNA, 15 bp, synthetic construct
  source 1..15: mol_type = other DNA
tcctcggtgcgtcag

SEQ ID NO: 12283 - DNA, 15 bp, synthetic construct
  source 1..15: mol_type = other DNA
accacgatgactgac

SEQ ID NO: 12284 - DNA, 15 bp, synthetic construct
  source 1..15: mol_type = other DNA
tctccaggcagaacg

SEQ ID NO: 12285 - DNA, 15 bp, synthetic construct
  source 1..15: mol_type = other DNA
agaatcgcgctgagg

SEQ ID NO: 12286 - DNA, 15 bp, synthetic construct
  source 1..15: mol_type = other DNA
gggtggcatcaaaac

SEQ ID NO: 12287 - DNA, 15 bp, synthetic construct
  source 1..15: mol_type = other DNA
ctaaactgcgaggag

SEQ ID NO: 12288 - DNA, 15 bp, synthetic construct
  source 1..15: mol_type = other DNA
atttcttcgccaagc

SEQ ID NO: 12289 - DNA, 15 bp, synthetic construct
  source 1..15: mol_type = other DNA
tcgcccgacgacttc

SEQ ID NO: 12290 - DNA, 15 bp, synthetic construct
  source 1..15: mol_type = other DNA
acacagcacattgcg

SEQ ID NO: 12291 - DNA, 15 bp, synthetic construct
  source 1..15: mol_type = other DNA
ctgcgggccctttaa

SEQ ID NO: 12292 - DNA, 15 bp, synthetic construct
  source 1..15: mol_type = other DNA
gccaggagcctctcg

SEQ ID NO: 12293 - DNA, 15 bp, synthetic construct
  source 1..15: mol_type = other DNA
cagcgagaggctcct

SEQ ID NO: 12294 - DNA, 15 bp, synthetic construct
  source 1..15: mol_type = other DNA
agtcccggtcctggc

SEQ ID NO: 12295 - DNA, 15 bp, synthetic construct
  source 1..15: mol_type = other DNA
actaggcagctgctc

SEQ ID NO: 12296 - DNA, 15 bp, synthetic construct
  source 1..15: mol_type = other DNA
cctggccgagctgaa

SEQ ID NO: 12297 - DNA, 15 bp, synthetic construct
  source 1..15: mol_type = other DNA
ctggaagtcgtaatc

SEQ ID NO: 12298 - DNA, 15 bp, synthetic construct
  source 1..15: mol_type = other DNA
ttccccttcttctcg

SEQ ID NO: 12299 - DNA, 15 bp, synthetic construct
  source 1..15: mol_type = other DNA
gttcatttggctttt

SEQ ID NO: 12300 - DNA, 15 bp, synthetic construct
  source 1..15: mol_type = other DNA
cagaggtttcatttg

SEQ ID NO: 12301 - DNA, 15 bp, synthetic construct
  source 1..15: mol_type = other DNA
ctggaactagttcat

SEQ ID NO: 12302 - DNA, 15 bp, synthetic construct
  source 1..15: mol_type = other DNA
aatgacatccaaata

SEQ ID NO: 12303 - DNA, 15 bp, synthetic construct
  source 1..15: mol_type = other DNA
gttacgccccgtgaa

SEQ ID NO: 12304 - DNA, 15 bp, synthetic construct
  source 1..15: mol_type = other DNA
attttccatgcaacc

SEQ ID NO: 12305 - DNA, 15 bp, synthetic construct
  source 1..15: mol_type = other DNA
aaccacgtacaactg

SEQ ID NO: 12306 - DNA, 15 bp, synthetic construct
  source 1..15: mol_type = other DNA
ttattccagagggaa

SEQ ID NO: 12307 - DNA, 15 bp, synthetic construct
  source 1..15: mol_type = other DNA
cctaaagaaaatgta

SEQ ID NO: 12308 - DNA, 15 bp, synthetic construct
  source 1..15: mol_type = other DNA
aaactacaaccaatg

SEQ ID NO: 12309 - DNA, 15 bp, synthetic construct
  source 1..15: mol_type = other DNA
atgaaaagaatcgcc

SEQ ID NO: 12310 - DNA, 15 bp, synthetic construct
  source 1..15: mol_type = other DNA
tctatgattttctct

SEQ ID NO: 12311 - DNA, 15 bp, synthetic construct
  source 1..15: mol_type = other DNA
actgaagctttttca

SEQ ID NO: 12312 - DNA, 15 bp, synthetic construct
  source 1..15: mol_type = other DNA
cgattttcagcacat

SEQ ID NO: 12313 - DNA, 15 bp, synthetic construct
  source 1..15: mol_type = other DNA
cacattttcactaaa

SEQ ID NO: 12314 - DNA, 15 bp, synthetic construct
  source 1..15: mol_type = other DNA
gttgatcacagacga

SEQ ID NO: 12315 - DNA, 15 bp, synthetic construct
  source 1..15: mol_type = other DNA
aatatcgaaaactgt

SEQ ID NO: 12316 - DNA, 15 bp, synthetic construct
  source 1..15: mol_type = other DNA
atgactaaccatcca

SEQ ID NO: 12317 - DNA, 15 bp, synthetic construct
  source 1..15: mol_type = other DNA
acaatagaattagca

SEQ ID NO: 12318 - DNA, 15 bp, synthetic construct
  source 1..15: mol_type = other DNA
cttcctttattcatg

SEQ ID NO: 12319 - DNA, 15 bp, synthetic construct
  source 1..15: mol_type = other DNA
acatacctcccattt

SEQ ID NO: 12320 - DNA, 15 bp, synthetic construct
  source 1..15: mol_type = other DNA
tcatttaaatgttgt

SEQ ID NO: 12321 - DNA, 15 bp, synthetic construct
  source 1..15: mol_type = other DNA
gtccaaccaggaagg

SEQ ID NO: 12322 - DNA, 15 bp, synthetic construct
  source 1..15: mol_type = other DNA
tgctcttcgcgctag

SEQ ID NO: 12323 - DNA, 15 bp, synthetic construct
  source 1..15: mol_type = other DNA
agatgttgccgataa

SEQ ID NO: 12324 - DNA, 15 bp, synthetic construct
  source 1..15: mol_type = other DNA
gccaatgggagtatg

SEQ ID NO: 12325 - DNA, 15 bp, synthetic construct
  source 1..15: mol_type = other DNA
cttgaaagcagttca

SEQ ID NO: 12326 - DNA, 15 bp, synthetic construct
  source 1..15: mol_type = other DNA
ctcgggccttgatag

SEQ ID NO: 12327 - DNA, 15 bp, synthetic construct
  source 1..15: mol_type = other DNA
cacgcactattcctt

SEQ ID NO: 12328 - DNA, 15 bp, synthetic construct
  source 1..15: mol_type = other DNA
tctctgtccatttag

SEQ ID NO: 12329 - DNA, 15 bp, synthetic construct
  source 1..15: mol_type = other DNA
tcgctgacaagtttt

SEQ ID NO: 12330 - DNA, 15 bp, synthetic construct
  source 1..15: mol_type = other DNA
ggttgttcccaagac

SEQ ID NO: 12331 - DNA, 15 bp, synthetic construct
  source 1..15: mol_type = other DNA
tcatattcaacaaca

SEQ ID NO: 12332 - DNA, 15 bp, synthetic construct
  source 1..15: mol_type = other DNA
cctagtaggagaggt

SEQ ID NO: 12333 - DNA, 15 bp, synthetic construct
  source 1..15: mol_type = other DNA
ctcttgaaccatgtt

SEQ ID NO: 12334 - DNA, 15 bp, synthetic construct
  source 1..15: mol_type = other DNA
gacctacgtgaatgt

SEQ ID NO: 12335 - DNA, 15 bp, synthetic construct
  source 1..15: mol_type = other DNA
taaggaactaaaggg

SEQ ID NO: 12336 - DNA, 15 bp, synthetic construct
  source 1..15: mol_type = other DNA
ttccctcctgattgc

SEQ ID NO: 12337 - DNA, 15 bp, synthetic construct
  source 1..15: mol_type = other DNA
ccacgtcagtcctaa

SEQ ID NO: 12338 - DNA, 15 bp, synthetic construct
  source 1..15: mol_type = other DNA
gctagcttgatgtct

SEQ ID NO: 12339 - DNA, 15 bp, synthetic construct
  source 1..15: mol_type = other DNA
ttcttctaaaactgt

SEQ ID NO: 12340 - DNA, 15 bp, synthetic construct
  source 1..15: mol_type = other DNA
ttgaagaaacagttg

SEQ ID NO: 12341 - DNA, 15 bp, synthetic construct
  source 1..15: mol_type = other DNA
tcgaggcgtctcgtg

SEQ ID NO: 12342 - DNA, 15 bp, synthetic construct
  source 1..15: mol_type = other DNA
gctcagctgtcttcg

SEQ ID NO: 12343 - DNA, 15 bp, synthetic construct
  source 1..15: mol_type = other DNA
gcctaatttgctgtg

SEQ ID NO: 12344 - DNA, 15 bp, synthetic construct
  source 1..15: mol_type = other DNA
gtcttgcgagagcac

SEQ ID NO: 12345 - DNA, 15 bp, synthetic construct
  source 1..15: mol_type = other DNA
aaacgaaatttggct

SEQ ID NO: 12346 - DNA, 15 bp, synthetic construct
  source 1..15: mol_type = other DNA
tctgaggattgtgca

SEQ ID NO: 12347 - DNA, 15 bp, synthetic construct
  source 1..15: mol_type = other DNA
ctgcggtcaaaaggg

SEQ ID NO: 12348 - DNA, 15 bp, synthetic construct
  source 1..15: mol_type = other DNA
ctgtccacttttccg

SEQ ID NO: 12349 - DNA, 15 bp, synthetic construct
  source 1..15: mol_type = other DNA
taccctgattgcgaa

SEQ ID NO: 12350 - DNA, 15 bp, synthetic construct
  source 1..15: mol_type = other DNA
cttcatcaaacagga

SEQ ID NO: 12351 - DNA, 15 bp, synthetic construct
  source 1..15: mol_type = other DNA
gcactgctcctcgtg

SEQ ID NO: 12352 - DNA, 15 bp, synthetic construct
  source 1..15: mol_type = other DNA
aatgggctccgacgt

SEQ ID NO: 12353 - DNA, 15 bp, synthetic construct
  source 1..15: mol_type = other DNA
agcgcgttcaggtcc

SEQ ID NO: 12354 - DNA, 15 bp, synthetic construct
  source 1..15: mol_type = other DNA
tctcctcgccgcgat

SEQ ID NO: 12355 - DNA, 15 bp, synthetic construct
  source 1..15: mol_type = other DNA
atcccgtgaaagaat

SEQ ID NO: 12356 - DNA, 15 bp, synthetic construct
  source 1..15: mol_type = other DNA
ggtggattcttaagt

SEQ ID NO: 12357 - DNA, 15 bp, synthetic construct
  source 1..15: mol_type = other DNA
gactagacgtccata

SEQ ID NO: 12358 - DNA, 15 bp, synthetic construct
  source 1..15: mol_type = other DNA
catgtatgcatgaag

SEQ ID NO: 12359 - DNA, 15 bp, synthetic construct
  source 1..15: mol_type = other DNA
acgctgctacactca

SEQ ID NO: 12360 - DNA, 15 bp, synthetic construct
  source 1..15: mol_type = other DNA
ataactacaccaagg

SEQ ID NO: 12361 - DNA, 15 bp, synthetic construct
  source 1..15: mol_type = other DNA
cctctacgatcttga

SEQ ID NO: 12362 - DNA, 15 bp, synthetic construct
  source 1..15: mol_type = other DNA
atcacagctgcctct

SEQ ID NO: 12363 - DNA, 15 bp, synthetic construct
  source 1..15: mol_type = other DNA
ttggagtaaaatccc

SEQ ID NO: 12364 - DNA, 15 bp, synthetic construct
  source 1..15: mol_type = other DNA
cttaaagatctcgac

SEQ ID NO: 12365 - DNA, 15 bp, synthetic construct
  source 1..15: mol_type = other DNA
atgaagaccaatgag

SEQ ID NO: 12366 - DNA, 15 bp, synthetic construct
  source 1..15: mol_type = other DNA
catcctcagatggta

SEQ ID NO: 12367 - DNA, 15 bp, synthetic construct
  source 1..15: mol_type = other DNA
gagagctattatgat

SEQ ID NO: 12368 - DNA, 15 bp, synthetic construct
  source 1..15: mol_type = other DNA
agtaggcttcacatc

SEQ ID NO: 12369 - DNA, 15 bp, synthetic construct
  source 1..15: mol_type = other DNA
aagggcccatgatcc

SEQ ID NO: 12370 - DNA, 15 bp, synthetic construct
  source 1..15: mol_type = other DNA
gttctccagctgcta

SEQ ID NO: 12371 - DNA, 15 bp, synthetic construct
  source 1..15: mol_type = other DNA
cagaccagtatcaga

SEQ ID NO: 12372 - DNA, 15 bp, synthetic construct
  source 1..15: mol_type = other DNA
cttaaattgggagac

SEQ ID NO: 12373 - DNA, 15 bp, synthetic construct
  source 1..15: mol_type = other DNA
cacagatgttaagga

SEQ ID NO: 12374 - DNA, 15 bp, synthetic construct
  source 1..15: mol_type = other DNA
tctgcttgctgaata

SEQ ID NO: 12375 - DNA, 15 bp, synthetic construct
  source 1..15: mol_type = other DNA
gtcaaggaggtttag

SEQ ID NO: 12376 - DNA, 15 bp, synthetic construct
  source 1..15: mol_type = other DNA
tcatagcatctgcca

SEQ ID NO: 12377 - DNA, 15 bp, synthetic construct
  source 1..15: mol_type = other DNA
taagaatatattccc

SEQ ID NO: 12378 - DNA, 15 bp, synthetic construct
  source 1..15: mol_type = other DNA
tgccaagatcgaacg

SEQ ID NO: 12379 - DNA, 15 bp, synthetic construct
  source 1..15: mol_type = other DNA
agtccagggtaaggc

SEQ ID NO: 12380 - DNA, 15 bp, synthetic construct
  source 1..15: mol_type = other DNA
ttatggccagcagaa

SEQ ID NO: 12381 - DNA, 15 bp, synthetic construct
  source 1..15: mol_type = other DNA
cctgagacacaacag

SEQ ID NO: 12382 - DNA, 15 bp, synthetic construct
  source 1..15: mol_type = other DNA
gacacaggtcgaaat

SEQ ID NO: 12383 - DNA, 15 bp, synthetic construct
  source 1..15: mol_type = other DNA
ctattgttgatcagt

SEQ ID NO: 12384 - DNA, 15 bp, synthetic construct
  source 1..15: mol_type = other DNA
tgggaacatgggtta

SEQ ID NO: 12385 - DNA, 15 bp, synthetic construct
  source 1..15: mol_type = other DNA
actatccaaagtgcc

SEQ ID NO: 12386 - DNA, 15 bp, synthetic construct
  source 1..15: mol_type = other DNA
tccggcgtatctcac

SEQ ID NO: 12387 - DNA, 15 bp, synthetic construct
  source 1..15: mol_type = other DNA
tgttgagctcaggaa

SEQ ID NO: 12388 - DNA, 15 bp, synthetic construct
  source 1..15: mol_type = other DNA
atacttgtgcttctc

SEQ ID NO: 12389 - DNA, 15 bp, synthetic construct
  source 1..15: mol_type = other DNA
tcaccgtctttctgg

SEQ ID NO: 12390 - DNA, 15 bp, synthetic construct
  source 1..15: mol_type = other DNA
ctcgactcctatatc

SEQ ID NO: 12391 - DNA, 15 bp, synthetic construct
  source 1..15: mol_type = other DNA
cacgaggatgacatt

SEQ ID NO: 12392 - DNA, 15 bp, synthetic construct
  source 1..15: mol_type = other DNA
tggagagttcccaat

SEQ ID NO: 12393 - DNA, 15 bp, synthetic construct
  source 1..15: mol_type = other DNA
gattgggaactctcc

SEQ ID NO: 12394 - DNA, 15 bp, synthetic construct
  source 1..15: mol_type = other DNA
caggtttatgtactg

SEQ ID NO: 12395 - DNA, 15 bp, synthetic construct
  source 1..15: mol_type = other DNA
atcctaggttgttgt

SEQ ID NO: 12396 - DNA, 15 bp, synthetic construct
  source 1..15: mol_type = other DNA
cctgacatactgtaa

SEQ ID NO: 12397 - DNA, 15 bp, synthetic construct
  source 1..15: mol_type = other DNA
tttaccccgtcataa

SEQ ID NO: 12398 - DNA, 15 bp, synthetic construct
  source 1..15: mol_type = other DNA
tggccggaaagtata

SEQ ID NO: 12399 - DNA, 15 bp, synthetic construct
  source 1..15: mol_type = other DNA
catctcatggtacag

SEQ ID NO: 12400 - DNA, 15 bp, synthetic construct
  source 1..15: mol_type = other DNA
aaaataggagccagt

SEQ ID NO: 12401 - DNA, 15 bp, synthetic construct
  source 1..15: mol_type = other DNA
tggctcctattttaa

SEQ ID NO: 12402 - DNA, 15 bp, synthetic construct
  source 1..15: mol_type = other DNA
tctggtgtttcaaga

SEQ ID NO: 12403 - DNA, 15 bp, synthetic construct
  source 1..15: mol_type = other DNA
gtaattgttgaaggg

SEQ ID NO: 12404 - DNA, 15 bp, synthetic construct
  source 1..15: mol_type = other DNA
gctgtgctcgagtga

SEQ ID NO: 12405 - DNA, 15 bp, synthetic construct
  source 1..15: mol_type = other DNA
atctagatctgtgat

SEQ ID NO: 12406 - DNA, 15 bp, synthetic construct
  source 1..15: mol_type = other DNA
tccccattgaacatc

SEQ ID NO: 12407 - DNA, 15 bp, synthetic construct
  source 1..15: mol_type = other DNA
cacatggtgtagaca

SEQ ID NO: 12408 - DNA, 15 bp, synthetic construct
  source 1..15: mol_type = other DNA
ctgaccctctatgga

SEQ ID NO: 12409 - DNA, 15 bp, synthetic construct
  source 1..15: mol_type = other DNA
cacatggtgtagaca

SEQ ID NO: 12410 - DNA, 15 bp, synthetic construct
  source 1..15: mol_type = other DNA
ctgaccctctatgga

SEQ ID NO: 12411 - DNA, 15 bp, synthetic construct
  source 1..15: mol_type = other DNA
tggatgtccattagg

SEQ ID NO: 12412 - DNA, 15 bp, synthetic construct
  source 1..15: mol_type = other DNA
gtcagactttgttga

SEQ ID NO: 12413 - DNA, 15 bp, synthetic construct
  source 1..15: mol_type = other DNA
gatccccttatctcc

SEQ ID NO: 12414 - DNA, 15 bp, synthetic construct
  source 1..15: mol_type = other DNA
ccgccaagtcattat

SEQ ID NO: 12415 - DNA, 15 bp, synthetic construct
  source 1..15: mol_type = other DNA
gcaaattcaattgtc

SEQ ID NO: 12416 - DNA, 15 bp, synthetic construct
  source 1..15: mol_type = other DNA
aaatcctaggtactc

SEQ ID NO: 12417 - DNA, 15 bp, synthetic construct
  source 1..15: mol_type = other DNA
ggtcactcttcctaa

SEQ ID NO: 12418 - DNA, 15 bp, synthetic construct
  source 1..15: mol_type = other DNA
gtaagagggtgaatg

SEQ ID NO: 12419 - DNA, 15 bp, synthetic construct
  source 1..15: mol_type = other DNA
gacttgaagtgaaga

SEQ ID NO: 12420 - DNA, 15 bp, synthetic construct
  source 1..15: mol_type = other DNA
ctagagtggaagtac

SEQ ID NO: 12421 - DNA, 15 bp, synthetic construct
  source 1..15: mol_type = other DNA
ccaattctcaaggtt

SEQ ID NO: 12422 - DNA, 15 bp, synthetic construct
  source 1..15: mol_type = other DNA
ccgtcgaatcagctt

SEQ ID NO: 12423 - DNA, 15 bp, synthetic construct
  source 1..15: mol_type = other DNA
acatctgtccagtac

SEQ ID NO: 12424 - DNA, 15 bp, synthetic construct
  source 1..15: mol_type = other DNA
attgaaccagatgtc

SEQ ID NO: 12425 - DNA, 15 bp, synthetic construct
  source 1..15: mol_type = other DNA
catgacaggcaatcc

SEQ ID NO: 12426 - DNA, 15 bp, synthetic construct
  source 1..15: mol_type = other DNA
tttgcagaccttcgc

SEQ ID NO: 12427 - DNA, 15 bp, synthetic construct
  source 1..15: mol_type = other DNA
aatggcaactctaag

SEQ ID NO: 12428 - DNA, 15 bp, synthetic construct
  source 1..15: mol_type = other DNA
cagcctgtactggac

SEQ ID NO: 12429 - DNA, 15 bp, synthetic construct
  source 1..15: mol_type = other DNA
gttgcgaatgatttc

SEQ ID NO: 12430 - DNA, 15 bp, synthetic construct
  source 1..15: mol_type = other DNA
ttcatctcttgtcct

SEQ ID NO: 12431 - DNA, 15 bp, synthetic construct
  source 1..15: mol_type = other DNA
aaaacctctaccaag

SEQ ID NO: 12432 - DNA, 15 bp, synthetic construct
  source 1..15: mol_type = other DNA
tgccgatacccatct

SEQ ID NO: 12433 - DNA, 15 bp, synthetic construct
  source 1..15: mol_type = other DNA
atgacagccttacgg

SEQ ID NO: 12434 - DNA, 15 bp, synthetic construct
  source 1..15: mol_type = other DNA
ctacctgttttctgc

SEQ ID NO: 12435 - DNA, 15 bp, synthetic construct
  source 1..15: mol_type = other DNA
tgcaagaaagttcgg

SEQ ID NO: 12436 - DNA, 15 bp, synthetic construct
  source 1..15: mol_type = other DNA
ttactatgggacatg

SEQ ID NO: 12437 - DNA, 15 bp, synthetic construct
  source 1..15: mol_type = other DNA
gtcctgctgcctaag

SEQ ID NO: 12438 - DNA, 15 bp, synthetic construct
  source 1..15: mol_type = other DNA
gctgcttaacaacct

SEQ ID NO: 12439 - DNA, 15 bp, synthetic construct
  source 1..15: mol_type = other DNA
cagaagacaagctcg

SEQ ID NO: 12440 - DNA, 15 bp, synthetic construct
  source 1..15: mol_type = other DNA
tatcccatgtttata

SEQ ID NO: 12441 - DNA, 15 bp, synthetic construct
  source 1..15: mol_type = other DNA
gagcaccagagtacc

SEQ ID NO: 12442 - DNA, 15 bp, synthetic construct
  source 1..15: mol_type = other DNA
agggagatctcttga

SEQ ID NO: 12443 - DNA, 15 bp, synthetic construct
  source 1..15: mol_type = other DNA
aggtcacaccgttca

SEQ ID NO: 12444 - DNA, 15 bp, synthetic construct
  source 1..15: mol_type = other DNA
gcaatgttaacaacg

SEQ ID NO: 12445 - DNA, 15 bp, synthetic construct
  source 1..15: mol_type = other DNA
tgtgagccggtagcc

SEQ ID NO: 12446 - DNA, 15 bp, synthetic construct
  source 1..15: mol_type = other DNA
ggttcaaagggaatc

SEQ ID NO: 12447 - DNA, 15 bp, synthetic construct
  source 1..15: mol_type = other DNA
ctttgaaccctatgg

SEQ ID NO: 12448 - DNA, 15 bp, synthetic construct
  source 1..15: mol_type = other DNA
gctcccatctctttg

SEQ ID NO: 12449 - DNA, 15 bp, synthetic construct
  source 1..15: mol_type = other DNA
ctataggctaagggt

SEQ ID NO: 12450 - DNA, 15 bp, synthetic construct
  source 1..15: mol_type = other DNA
gggtactgatataag

SEQ ID NO: 12451 - DNA, 15 bp, synthetic construct
  source 1..15: mol_type = other DNA
tctccttagttcaag

SEQ ID NO: 12452 - DNA, 15 bp, synthetic construct
  source 1..15: mol_type = other DNA
ttgtgtttccctagc

SEQ ID NO: 12453 - DNA, 15 bp, synthetic construct
  source 1..15: mol_type = other DNA
atttccccactcact

SEQ ID NO: 12454 - DNA, 15 bp, synthetic construct
  source 1..15: mol_type = other DNA
ttctggtccctcttg

SEQ ID NO: 12455 - DNA, 15 bp, synthetic construct
  source 1..15: mol_type = other DNA
cagaaactcctctct

SEQ ID NO: 12456 - DNA, 15 bp, synthetic construct
  source 1..15: mol_type = other DNA
tcctcgacatctacc

SEQ ID NO: 12457 - DNA, 15 bp, synthetic construct
  source 1..15: mol_type = other DNA
gcagtcagactcgtc

SEQ ID NO: 12458 - DNA, 15 bp, synthetic construct
  source 1..15: mol_type = other DNA
gatgaaacctggtta

SEQ ID NO: 12459 - DNA, 15 bp, synthetic construct
  source 1..15: mol_type = other DNA
catattcaggtggac

SEQ ID NO: 12460 - DNA, 15 bp, synthetic construct
  source 1..15: mol_type = other DNA
gcattggtactgcga

SEQ ID NO: 12461 - DNA, 15 bp, synthetic construct
  source 1..15: mol_type = other DNA
cgacagttctcctca

SEQ ID NO: 12462 - DNA, 15 bp, synthetic construct
  source 1..15: mol_type = other DNA
actgctgtcccatcg

SEQ ID NO: 12463 - DNA, 15 bp, synthetic construct
  source 1..15: mol_type = other DNA
ggcagttggaggttt

SEQ ID NO: 12464 - DNA, 15 bp, synthetic construct
  source 1..15: mol_type = other DNA
tggctactgcatccg

SEQ ID NO: 12465 - DNA, 15 bp, synthetic construct
  source 1..15: mol_type = other DNA
catcgctgttgtcgc

SEQ ID NO: 12466 - DNA, 15 bp, synthetic construct
  source 1..15: mol_type = other DNA
cgaagtcagataagc

SEQ ID NO: 12467 - DNA, 15 bp, synthetic construct
  source 1..15: mol_type = other DNA
aatcctttcccagtg

SEQ ID NO: 12468 - DNA, 15 bp, synthetic construct
  source 1..15: mol_type = other DNA
gcaaaaggctatctg

SEQ ID NO: 12469 - DNA, 15 bp, synthetic construct
  source 1..15: mol_type = other DNA
tctatcaagcttgca

SEQ ID NO: 12470 - DNA, 15 bp, synthetic construct
  source 1..15: mol_type = other DNA
ctcttggagagtgta

SEQ ID NO: 12471 - DNA, 15 bp, synthetic construct
  source 1..15: mol_type = other DNA
actacatccatcctc

SEQ ID NO: 12472 - DNA, 15 bp, synthetic construct
  source 1..15: mol_type = other DNA
aggctcctctacttt

SEQ ID NO: 12473 - DNA, 15 bp, synthetic construct
  source 1..15: mol_type = other DNA
ccgggaggcgagtcc

SEQ ID NO: 12474 - DNA, 15 bp, synthetic construct
  source 1..15: mol_type = other DNA
gcacccgggacgctt

SEQ ID NO: 12475 - DNA, 15 bp, synthetic construct
  source 1..15: mol_type = other DNA
gtagggtagtcttaa

SEQ ID NO: 12476 - DNA, 15 bp, synthetic construct
  source 1..15: mol_type = other DNA
gtgaagtcaaagtta

SEQ ID NO: 12477 - DNA, 15 bp, synthetic construct
  source 1..15: mol_type = other DNA
agatcaagctgtaag

SEQ ID NO: 12478 - DNA, 15 bp, synthetic construct
  source 1..15: mol_type = other DNA
tacccagaagaaatg

SEQ ID NO: 12479 - DNA, 15 bp, synthetic construct
  source 1..15: mol_type = other DNA
caaaccactgtaaag

SEQ ID NO: 12480 - DNA, 15 bp, synthetic construct
  source 1..15: mol_type = other DNA
ctcaagtaggaggga

SEQ ID NO: 12481 - DNA, 15 bp, synthetic construct
  source 1..15: mol_type = other DNA
agtgggttcttactc

SEQ ID NO: 12482 - DNA, 15 bp, synthetic construct
  source 1..15: mol_type = other DNA
tttgaatggtactct

SEQ ID NO: 12483 - DNA, 15 bp, synthetic construct
  source 1..15: mol_type = other DNA
agagaaagacagtta

SEQ ID NO: 12484 - DNA, 15 bp, synthetic construct
  source 1..15: mol_type = other DNA
gtggtacgtttcagc

SEQ ID NO: 12485 - DNA, 15 bp, synthetic construct
  source 1..15: mol_type = other DNA
tgagcaagaggataa

SEQ ID NO: 12486 - DNA, 15 bp, synthetic construct
  source 1..15: mol_type = other DNA
aaatctttggtttca

SEQ ID NO: 12487 - DNA, 15 bp, synthetic construct
  source 1..15: mol_type = other DNA
ttatacccatctacc

SEQ ID NO: 12488 - DNA, 15 bp, synthetic construct
  source 1..15: mol_type = other DNA
ctttgtattttggga

SEQ ID NO: 12489 - DNA, 15 bp, synthetic construct
  source 1..15: mol_type = other DNA
tctagcaaagaacca

SEQ ID NO: 12490 - DNA, 15 bp, synthetic construct
  source 1..15: mol_type = other DNA
aaaaataatttccat

SEQ ID NO: 12491 - DNA, 15 bp, synthetic construct
  source 1..15: mol_type = other DNA
agcaaaatgacacaa

SEQ ID NO: 12492 - DNA, 15 bp, synthetic construct
  source 1..15: mol_type = other DNA
tggaatgcggcttgg

SEQ ID NO: 12493 - DNA, 15 bp, synthetic construct
  source 1..15: mol_type = other DNA
tccccggagagttcg

SEQ ID NO: 12494 - DNA, 15 bp, synthetic construct
  source 1..15: mol_type = other DNA
tcgtgtgcctataat

SEQ ID NO: 12495 - DNA, 15 bp, synthetic construct
  source 1..15: mol_type = other DNA
cacaatattttggta

SEQ ID NO: 12496 - DNA, 15 bp, synthetic construct
  source 1..15: mol_type = other DNA
tggctttcaacaagt

SEQ ID NO: 12497 - DNA, 15 bp, synthetic construct
  source 1..15: mol_type = other DNA
tagcaatcatggcaa

SEQ ID NO: 12498 - DNA, 15 bp, synthetic construct
  source 1..15: mol_type = other DNA
caggtaatttcatgg

SEQ ID NO: 12499 - DNA, 15 bp, synthetic construct
  source 1..15: mol_type = other DNA
gaatatgagggcaaa

SEQ ID NO: 12500 - DNA, 15 bp, synthetic construct
  source 1..15: mol_type = other DNA
tttctttaaggtttg

SEQ ID NO: 12501 - DNA, 15 bp, synthetic construct
  source 1..15: mol_type = other DNA
gaacataccacaccc

SEQ ID NO: 12502 - DNA, 15 bp, synthetic construct
  source 1..15: mol_type = other DNA
caataattttaaacc

SEQ ID NO: 12503 - DNA, 15 bp, synthetic construct
  source 1..15: mol_type = other DNA
tatttcagatgtgtt

SEQ ID NO: 12504 - DNA, 15 bp, synthetic construct
  source 1..15: mol_type = other DNA
ttcatagcacctaga

SEQ ID NO: 12505 - DNA, 15 bp, synthetic construct
  source 1..15: mol_type = other DNA
taaaacctagtcaaa

SEQ ID NO: 12506 - DNA, 15 bp, synthetic construct
  source 1..15: mol_type = other DNA
acgaataacttggga

SEQ ID NO: 12507 - DNA, 15 bp, synthetic construct
  source 1..15: mol_type = other DNA
tcccatgctttacaa

SEQ ID NO: 12508 - DNA, 15 bp, synthetic construct
  source 1..15: mol_type = other DNA
tgatgcccaatgtat

SEQ ID NO: 12509 - DNA, 15 bp, synthetic construct
  source 1..15: mol_type = other DNA
tcactggcttctaaa

SEQ ID NO: 12510 - DNA, 15 bp, synthetic construct
  source 1..15: mol_type = other DNA
cttccaagaagttgc

SEQ ID NO: 12511 - DNA, 15 bp, synthetic construct
  source 1..15: mol_type = other DNA
aagaggtgagatata

SEQ ID NO: 12512 - DNA, 15 bp, synthetic construct
  source 1..15: mol_type = other DNA
ctgttttgaagtgct

SEQ ID NO: 12513 - DNA, 15 bp, synthetic construct
  source 1..15: mol_type = other DNA
gcaaagagcctagcc

SEQ ID NO: 12514 - DNA, 15 bp, synthetic construct
  source 1..15: mol_type = other DNA
ttgtagaagtaatgt

SEQ ID NO: 12515 - DNA, 15 bp, synthetic construct
  source 1..15: mol_type = other DNA
cctttaagacaaggg

SEQ ID NO: 12516 - DNA, 15 bp, synthetic construct
  source 1..15: mol_type = other DNA
tcttgtctggtccac

SEQ ID NO: 12517 - DNA, 15 bp, synthetic construct
  source 1..15: mol_type = other DNA
tacaagttttccctc

SEQ ID NO: 12518 - DNA, 15 bp, synthetic construct
  source 1..15: mol_type = other DNA
tgcctctttgattaa

SEQ ID NO: 12519 - DNA, 15 bp, synthetic construct
  source 1..15: mol_type = other DNA
agttgaatgcatcat

SEQ ID NO: 12520 - DNA, 15 bp, synthetic construct
  source 1..15: mol_type = other DNA
tagaacttgccttac

SEQ ID NO: 12521 - DNA, 15 bp, synthetic construct
  source 1..15: mol_type = other DNA
tgctgaatttccatt

SEQ ID NO: 12522 - DNA, 15 bp, synthetic construct
  source 1..15: mol_type = other DNA
taagacataaatgtt

SEQ ID NO: 12523 - DNA, 15 bp, synthetic construct
  source 1..15: mol_type = other DNA
gtgaaacgaagcata

SEQ ID NO: 12524 - DNA, 15 bp, synthetic construct
  source 1..15: mol_type = other DNA
atgcacatctcaatt

SEQ ID NO: 12525 - DNA, 15 bp, synthetic construct
  source 1..15: mol_type = other DNA
gtctcaagaaggtct

SEQ ID NO: 12526 - DNA, 15 bp, synthetic construct
  source 1..15: mol_type = other DNA
tggcatcaaaagttt

SEQ ID NO: 12527 - DNA, 15 bp, synthetic construct
  source 1..15: mol_type = other DNA
caatctgccctatat

SEQ ID NO: 12528 - DNA, 15 bp, synthetic construct
  source 1..15: mol_type = other DNA
ccaaatctctattat

SEQ ID NO: 12529 - DNA, 15 bp, synthetic construct
  source 1..15: mol_type = other DNA
attactgggaaagtg

SEQ ID NO: 12530 - DNA, 15 bp, synthetic construct
  source 1..15: mol_type = other DNA
attcacaaatgaagc

SEQ ID NO: 12531 - DNA, 15 bp, synthetic construct
  source 1..15: mol_type = other DNA
gtaaagccttacata

SEQ ID NO: 12532 - DNA, 15 bp, synthetic construct
  source 1..15: mol_type = other DNA
atgtgttgaattcca

SEQ ID NO: 12533 - DNA, 15 bp, synthetic construct
  source 1..15: mol_type = other DNA
atttgagcatctact

SEQ ID NO: 12534 - DNA, 15 bp, synthetic construct
  source 1..15: mol_type = other DNA
ataaactggtggact

SEQ ID NO: 12535 - DNA, 15 bp, synthetic construct
  source 1..15: mol_type = other DNA
ttcttagcatgaaat

SEQ ID NO: 12536 - DNA, 15 bp, synthetic construct
  source 1..15: mol_type = other DNA
tgaaaaagtaagtca

SEQ ID NO: 12537 - DNA, 15 bp, synthetic construct
  source 1..15: mol_type = other DNA
taccataacagagtt

SEQ ID NO: 12538 - DNA, 15 bp, synthetic construct
  source 1..15: mol_type = other DNA
taatagcccttgctt

SEQ ID NO: 12539 - DNA, 15 bp, synthetic construct
  source 1..15: mol_type = other DNA
ctccacatcagtaca

SEQ ID NO: 12540 - DNA, 15 bp, synthetic construct
  source 1..15: mol_type = other DNA
tcccttgaatatcac

SEQ ID NO: 12541 - DNA, 15 bp, synthetic construct
  source 1..15: mol_type = other DNA
ttcacaatcctgttt

SEQ ID NO: 12542 - DNA, 15 bp, synthetic construct
  source 1..15: mol_type = other DNA
gattctttgcagcag

SEQ ID NO: 12543 - DNA, 15 bp, synthetic construct
  source 1..15: mol_type = other DNA
ggaataagactggaa

SEQ ID NO: 12544 - DNA, 15 bp, synthetic construct
  source 1..15: mol_type = other DNA
attataaagaccttg

SEQ ID NO: 12545 - DNA, 15 bp, synthetic construct
  source 1..15: mol_type = other DNA
ttaacattccttgtt

SEQ ID NO: 12546 - DNA, 15 bp, synthetic construct
  source 1..15: mol_type = other DNA
ctatcagttaattcc

SEQ ID NO: 12547 - DNA, 15 bp, synthetic construct
  source 1..15: mol_type = other DNA
attaggagatattcc

SEQ ID NO: 12548 - DNA, 15 bp, synthetic construct
  source 1..15: mol_type = other DNA
aaaattctggttatt

SEQ ID NO: 12549 - DNA, 15 bp, synthetic construct
  source 1..15: mol_type = other DNA
cattttaagcggtag

SEQ ID NO: 12550 - DNA, 15 bp, synthetic construct
  source 1..15: mol_type = other DNA
tgataatcttgatgt

SEQ ID NO: 12551 - DNA, 15 bp, synthetic construct
  source 1..15: mol_type = other DNA
aacctgtgcactgtt

SEQ ID NO: 12552 - DNA, 15 bp, synthetic construct
  source 1..15: mol_type = other DNA
gaaaagcataaactt

SEQ ID NO: 12553 - DNA, 15 bp, synthetic construct
  source 1..15: mol_type = other DNA
actttgggtacagcg

SEQ ID NO: 12554 - DNA, 15 bp, synthetic construct
  source 1..15: mol_type = other DNA
tcagctcccttagtc

SEQ ID NO: 12555 - DNA, 15 bp, synthetic construct
  source 1..15: mol_type = other DNA
aaatgacagggacta

SEQ ID NO: 12556 - DNA, 15 bp, synthetic construct
  source 1..15: mol_type = other DNA
actttcgggaattca

SEQ ID NO: 12557 - DNA, 15 bp, synthetic construct
  source 1..15: mol_type = other DNA
ttccgtaccaatgct

SEQ ID NO: 12558 - DNA, 15 bp, synthetic construct
  source 1..15: mol_type = other DNA
agcctcgcaacgaag

SEQ ID NO: 12559 - DNA, 15 bp, synthetic construct
  source 1..15: mol_type = other DNA
aggaactagaagcct

SEQ ID NO: 12560 - DNA, 15 bp, synthetic construct
  source 1..15: mol_type = other DNA
ttccagagtgcctta

SEQ ID NO: 12561 - DNA, 15 bp, synthetic construct
  source 1..15: mol_type = other DNA
ttcattggttgtact

SEQ ID NO: 12562 - DNA, 15 bp, synthetic construct
  source 1..15: mol_type = other DNA
gactgccactcttac

SEQ ID NO: 12563 - DNA, 15 bp, synthetic construct
  source 1..15: mol_type = other DNA
tcccttcatgtctgg

SEQ ID NO: 12564 - DNA, 15 bp, synthetic construct
  source 1..15: mol_type = other DNA
tcctagccctttagc

SEQ ID NO: 12565 - DNA, 15 bp, synthetic construct
  source 1..15: mol_type = other DNA
ttgcagcgaaaaatg

SEQ ID NO: 12566 - DNA, 15 bp, synthetic construct
  source 1..15: mol_type = other DNA
ttacctagtctctgg

SEQ ID NO: 12567 - DNA, 15 bp, synthetic construct
  source 1..15: mol_type = other DNA
atctccttcagaact

SEQ ID NO: 12568 - DNA, 15 bp, synthetic construct
  source 1..15: mol_type = other DNA
agtcttctagcaagg

SEQ ID NO: 12569 - DNA, 15 bp, synthetic construct
  source 1..15: mol_type = other DNA
tgaaatgatactcag

SEQ ID NO: 12570 - DNA, 15 bp, synthetic construct
  source 1..15: mol_type = other DNA
aatgtggcttctatc

SEQ ID NO: 12571 - DNA, 15 bp, synthetic construct
  source 1..15: mol_type = other DNA
accgttatcccttag

SEQ ID NO: 12572 - DNA, 15 bp, synthetic construct
  source 1..15: mol_type = other DNA
acacacctccggaat

SEQ ID NO: 12573 - DNA, 15 bp, synthetic construct
  source 1..15: mol_type = other DNA
agttagacaccaacc

SEQ ID NO: 12574 - DNA, 15 bp, synthetic construct
  source 1..15: mol_type = other DNA
aaggttcttggtagg

SEQ ID NO: 12575 - DNA, 15 bp, synthetic construct
  source 1..15: mol_type = other DNA
aactagttcatggaa

SEQ ID NO: 12576 - DNA, 15 bp, synthetic construct
  source 1..15: mol_type = other DNA
taccagcttgtctca

SEQ ID NO: 12577 - DNA, 15 bp, synthetic construct
  source 1..15: mol_type = other DNA
attaagtgactttaa

SEQ ID NO: 12578 - DNA, 15 bp, synthetic construct
  source 1..15: mol_type = other DNA
aaggccacgctaata

SEQ ID NO: 12579 - DNA, 15 bp, synthetic construct
  source 1..15: mol_type = other DNA
acaaagggaaacctc

SEQ ID NO: 12580 - DNA, 15 bp, synthetic construct
  source 1..15: mol_type = other DNA
cctctagtgatgaga

SEQ ID NO: 12581 - DNA, 15 bp, synthetic construct
  source 1..15: mol_type = other DNA
tttcctgtttagggt

SEQ ID NO: 12582 - DNA, 15 bp, synthetic construct
  source 1..15: mol_type = other DNA
ggtgtggctaaagta

SEQ ID NO: 12583 - DNA, 15 bp, synthetic construct
  source 1..15: mol_type = other DNA
tagcataagtgaagt

SEQ ID NO: 12584 - DNA, 15 bp, synthetic construct
  source 1..15: mol_type = other DNA
ggtatgactatggca

SEQ ID NO: 12585 - DNA, 15 bp, synthetic construct
  source 1..15: mol_type = other DNA
tatagcataacaaca

SEQ ID NO: 12586 - DNA, 15 bp, synthetic construct
  source 1..15: mol_type = other DNA
ttctgttctgttatt

SEQ ID NO: 12587 - DNA, 15 bp, synthetic construct
  source 1..15: mol_type = other DNA
caaagtgtccttcag

SEQ ID NO: 12588 - DNA, 15 bp, synthetic construct
  source 1..15: mol_type = other DNA
agactcgccaagagt

SEQ ID NO: 12589 - DNA, 15 bp, synthetic construct
  source 1..15: mol_type = other DNA
caaagtgtccttcag

SEQ ID NO: 12590 - DNA, 15 bp, synthetic construct
  source 1..15: mol_type = other DNA
agactcgccaagagt

SEQ ID NO: 12591 - DNA, 15 bp, synthetic construct
  source 1..15: mol_type = other DNA
gagaatgagaatcga

SEQ ID NO: 12592 - DNA, 15 bp, synthetic construct
  source 1..15: mol_type = other DNA
aggatgaccccatca

SEQ ID NO: 12593 - DNA, 15 bp, synthetic construct
  source 1..15: mol_type = other DNA
gagaatgagaatcga

SEQ ID NO: 12594 - DNA, 15 bp, synthetic construct
  source 1..15: mol_type = other DNA
aggatgaccccatca

SEQ ID NO: 12595 - DNA, 15 bp, synthetic construct
  source 1..15: mol_type = other DNA
ttacctgagggctaa

SEQ ID NO: 12596 - DNA, 15 bp, synthetic construct
  source 1..15: mol_type = other DNA
ccagtacctatgtgg

SEQ ID NO: 12597 - DNA, 15 bp, synthetic construct
  source 1..15: mol_type = other DNA
tactcatgtatgccc

SEQ ID NO: 12598 - DNA, 15 bp, synthetic construct
  source 1..15: mol_type = other DNA
cggtatcttacctct

SEQ ID NO: 12599 - DNA, 15 bp, synthetic construct
  source 1..15: mol_type = other DNA
ggtagctttgaatgt

SEQ ID NO: 12600 - DNA, 15 bp, synthetic construct
  source 1..15: mol_type = other DNA
ctaatccccctattc

SEQ ID NO: 12601 - DNA, 15 bp, synthetic construct
  source 1..15: mol_type = other DNA
ggtagctttgaatgt

SEQ ID NO: 12602 - DNA, 15 bp, synthetic construct
  source 1..15: mol_type = other DNA
ctaatccccctattc

SEQ ID NO: 12603 - DNA, 15 bp, synthetic construct
  source 1..15: mol_type = other DNA
atcccctaaaatatg

SEQ ID NO: 12604 - DNA, 15 bp, synthetic construct
  source 1..15: mol_type = other DNA
tcttccttcctaggc

SEQ ID NO: 12605 - DNA, 15 bp, synthetic construct
  source 1..15: mol_type = other DNA
tatcctcatttctca

SEQ ID NO: 12606 - DNA, 15 bp, synthetic construct
  source 1..15: mol_type = other DNA
tttcttattgccagt

SEQ ID NO: 12607 - DNA, 15 bp, synthetic construct
  source 1..15: mol_type = other DNA
aagctccccttcact

SEQ ID NO: 12608 - DNA, 15 bp, synthetic construct
  source 1..15: mol_type = other DNA
atctcagcacaatga

SEQ ID NO: 12609 - DNA, 15 bp, synthetic construct
  source 1..15: mol_type = other DNA
agggtgtaccagaag

SEQ ID NO: 12610 - DNA, 15 bp, synthetic construct
  source 1..15: mol_type = other DNA
ttcaccctcttttcc

SEQ ID NO: 12611 - DNA, 15 bp, synthetic construct
  source 1..15: mol_type = other DNA
caactctctttgctt

SEQ ID NO: 12612 - DNA, 15 bp, synthetic construct
  source 1..15: mol_type = other DNA
aaaagctgaactcct

SEQ ID NO: 12613 - DNA, 15 bp, synthetic construct
  source 1..15: mol_type = other DNA
tccattctctaaacc

SEQ ID NO: 12614 - DNA, 15 bp, synthetic construct
  source 1..15: mol_type = other DNA
gtggtaagggcctga

SEQ ID NO: 12615 - DNA, 15 bp, synthetic construct
  source 1..15: mol_type = other DNA
ttccaccaactctcc

SEQ ID NO: 12616 - DNA, 15 bp, synthetic construct
  source 1..15: mol_type = other DNA
gagctctcttctctg

SEQ ID NO: 12617 - DNA, 15 bp, synthetic construct
  source 1..15: mol_type = other DNA
caggcaatcaaccat

SEQ ID NO: 12618 - DNA, 15 bp, synthetic construct
  source 1..15: mol_type = other DNA
ggagagttgattggc

SEQ ID NO: 12619 - DNA, 15 bp, synthetic construct
  source 1..15: mol_type = other DNA
ggtggctctcaatcc

SEQ ID NO: 12620 - DNA, 15 bp, synthetic construct
  source 1..15: mol_type = other DNA
cttaaagagacctga

SEQ ID NO: 12621 - DNA, 15 bp, synthetic construct
  source 1..15: mol_type = other DNA
ggtctctttaaggct

SEQ ID NO: 12622 - DNA, 15 bp, synthetic construct
  source 1..15: mol_type = other DNA
ggctttgatgatcac

SEQ ID NO: 12623 - DNA, 15 bp, synthetic construct
  source 1..15: mol_type = other DNA
tgttcaatgtctagc

SEQ ID NO: 12624 - DNA, 15 bp, synthetic construct
  source 1..15: mol_type = other DNA
gttttctaggtttat

SEQ ID NO: 12625 - DNA, 15 bp, synthetic construct
  source 1..15: mol_type = other DNA
tctgaaaacacatag

SEQ ID NO: 12626 - DNA, 15 bp, synthetic construct
  source 1..15: mol_type = other DNA
tgtggtcacctatac

SEQ ID NO: 12627 - DNA, 15 bp, synthetic construct
  source 1..15: mol_type = other DNA
cggaaaacatcagag

SEQ ID NO: 12628 - DNA, 15 bp, synthetic construct
  source 1..15: mol_type = other DNA
cgaaagcagcttaca

SEQ ID NO: 12629 - DNA, 15 bp, synthetic construct
  source 1..15: mol_type = other DNA
cccaaatagctaatg

SEQ ID NO: 12630 - DNA, 15 bp, synthetic construct
  source 1..15: mol_type = other DNA
atcgcctctacaatt

SEQ ID NO: 12631 - DNA, 15 bp, synthetic construct
  source 1..15: mol_type = other DNA
gtacagctcatactg

SEQ ID NO: 12632 - DNA, 15 bp, synthetic construct
  source 1..15: mol_type = other DNA
agatgggtgtgcata

SEQ ID NO: 12633 - DNA, 15 bp, synthetic construct
  source 1..15: mol_type = other DNA
aaggctcctcttgtc

SEQ ID NO: 12634 - DNA, 15 bp, synthetic construct
  source 1..15: mol_type = other DNA
gggtttggacttctc

SEQ ID NO: 12635 - DNA, 15 bp, synthetic construct
  source 1..15: mol_type = other DNA
ccatagacatgctcc

SEQ ID NO: 12636 - DNA, 15 bp, synthetic construct
  source 1..15: mol_type = other DNA
tggagagtggtcctc

SEQ ID NO: 12637 - DNA, 15 bp, synthetic construct
  source 1..15: mol_type = other DNA
ccatagacatgctcc

SEQ ID NO: 12638 - DNA, 15 bp, synthetic construct
  source 1..15: mol_type = other DNA
tggagagtggtcctc

SEQ ID NO: 12639 - DNA, 15 bp, synthetic construct
  source 1..15: mol_type = other DNA
aagtttctcatgggc

SEQ ID NO: 12640 - DNA, 15 bp, synthetic construct
  source 1..15: mol_type = other DNA
cctttggacccttgg

SEQ ID NO: 12641 - DNA, 15 bp, synthetic construct
  source 1..15: mol_type = other DNA
ctgactttcagtatc

SEQ ID NO: 12642 - DNA, 15 bp, synthetic construct
  source 1..15: mol_type = other DNA
aaggttaatctcacg

SEQ ID NO: 12643 - DNA, 15 bp, synthetic construct
  source 1..15: mol_type = other DNA
gatttacctagagaa

SEQ ID NO: 12644 - DNA, 15 bp, synthetic construct
  source 1..15: mol_type = other DNA
tcacatttcccagat

SEQ ID NO: 12645 - DNA, 15 bp, synthetic construct
  source 1..15: mol_type = other DNA
tcacactaggttccc

SEQ ID NO: 12646 - DNA, 15 bp, synthetic construct
  source 1..15: mol_type = other DNA
cttccttatatttct

SEQ ID NO: 12647 - DNA, 15 bp, synthetic construct
  source 1..15: mol_type = other DNA
atatcagcaaccaaa

SEQ ID NO: 12648 - DNA, 15 bp, synthetic construct
  source 1..15: mol_type = other DNA
gtatcccatttcctt

SEQ ID NO: 12649 - DNA, 15 bp, synthetic construct
  source 1..15: mol_type = other DNA
ccctttccaaattac

SEQ ID NO: 12650 - DNA, 15 bp, synthetic construct
  source 1..15: mol_type = other DNA
cactgcaggtgatag

SEQ ID NO: 12651 - DNA, 15 bp, synthetic construct
  source 1..15: mol_type = other DNA
tctcccacattaccc

SEQ ID NO: 12652 - DNA, 15 bp, synthetic construct
  source 1..15: mol_type = other DNA
agtgctatgacagga

SEQ ID NO: 12653 - DNA, 15 bp, synthetic construct
  source 1..15: mol_type = other DNA
tggaatgggacttgg

SEQ ID NO: 12654 - DNA, 15 bp, synthetic construct
  source 1..15: mol_type = other DNA
gagtgcgcactctac

SEQ ID NO: 12655 - DNA, 15 bp, synthetic construct
  source 1..15: mol_type = other DNA
tcttgcgtcatttcc

SEQ ID NO: 12656 - DNA, 15 bp, synthetic construct
  source 1..15: mol_type = other DNA
tcaccatgatcccaa

SEQ ID NO: 12657 - DNA, 15 bp, synthetic construct
  source 1..15: mol_type = other DNA
cgtgccatcatgtcc

SEQ ID NO: 12658 - DNA, 15 bp, synthetic construct
  source 1..15: mol_type = other DNA
gacatgcccaaaccg

SEQ ID NO: 12659 - DNA, 15 bp, synthetic construct
  source 1..15: mol_type = other DNA
gacatgcccaaaccg

SEQ ID NO: 12660 - DNA, 15 bp, synthetic construct
  source 1..15: mol_type = other DNA
tgcagtaacatgacc

SEQ ID NO: 12661 - DNA, 15 bp, synthetic construct
  source 1..15: mol_type = other DNA
gggccccttgagtag

SEQ ID NO: 12662 - DNA, 15 bp, synthetic construct
  source 1..15: mol_type = other DNA
ggaaatagccaggag

SEQ ID NO: 12663 - DNA, 15 bp, synthetic construct
  source 1..15: mol_type = other DNA
ccctcctggacaaca

SEQ ID NO: 12664 - DNA, 15 bp, synthetic construct
  source 1..15: mol_type = other DNA
accttggccacgatt

SEQ ID NO: 12665 - DNA, 15 bp, synthetic construct
  source 1..15: mol_type = other DNA
agccgtgtgtggatg

SEQ ID NO: 12666 - DNA, 15 bp, synthetic construct
  source 1..15: mol_type = other DNA
ggccccatttgtaga

SEQ ID NO: 12667 - DNA, 15 bp, synthetic construct
  source 1..15: mol_type = other DNA
atatactcctcaaaa

SEQ ID NO: 12668 - DNA, 15 bp, synthetic construct
  source 1..15: mol_type = other DNA
cccagccaggtagat

SEQ ID NO: 12669 - DNA, 15 bp, synthetic construct
  source 1..15: mol_type = other DNA
ccatcagtggaacct

SEQ ID NO: 12670 - DNA, 15 bp, synthetic construct
  source 1..15: mol_type = other DNA
gcgctttctagactt

SEQ ID NO: 12671 - DNA, 15 bp, synthetic construct
  source 1..15: mol_type = other DNA
gtgggctctaggtgt

SEQ ID NO: 12672 - DNA, 15 bp, synthetic construct
  source 1..15: mol_type = other DNA
gacctacggagagtg

SEQ ID NO: 12673 - DNA, 15 bp, synthetic construct
  source 1..15: mol_type = other DNA
ctaacctggagctac

SEQ ID NO: 12674 - DNA, 15 bp, synthetic construct
  source 1..15: mol_type = other DNA
gtcatcaccaagggt

SEQ ID NO: 12675 - DNA, 15 bp, synthetic construct
  source 1..15: mol_type = other DNA
ctaacctggagctac

SEQ ID NO: 12676 - DNA, 15 bp, synthetic construct
  source 1..15: mol_type = other DNA
gtcatcaccaagggt

SEQ ID NO: 12677 - DNA, 15 bp, synthetic construct
  source 1..15: mol_type = other DNA
actcggtctccttgc

SEQ ID NO: 12678 - DNA, 15 bp, synthetic construct
  source 1..15: mol_type = other DNA
aggagagtctcccat

SEQ ID NO: 12679 - DNA, 15 bp, synthetic construct
  source 1..15: mol_type = other DNA
cagcatcccaaccac

SEQ ID NO: 12680 - DNA, 15 bp, synthetic construct
  source 1..15: mol_type = other DNA
gtgaggagccatcgt

SEQ ID NO: 12681 - DNA, 15 bp, synthetic construct
  source 1..15: mol_type = other DNA
ggctggcagagtcgg

SEQ ID NO: 12682 - DNA, 15 bp, synthetic construct
  source 1..15: mol_type = other DNA
ctctctgagaccttc

SEQ ID NO: 12683 - DNA, 15 bp, synthetic construct
  source 1..15: mol_type = other DNA
aggtctcagagagga

SEQ ID NO: 12684 - DNA, 15 bp, synthetic construct
  source 1..15: mol_type = other DNA
cacaacgtggagata

SEQ ID NO: 12685 - DNA, 15 bp, synthetic construct
  source 1..15: mol_type = other DNA
ttgctttcagccatg

SEQ ID NO: 12686 - DNA, 15 bp, synthetic construct
  source 1..15: mol_type = other DNA
tcctgtcgggagtga

SEQ ID NO: 12687 - DNA, 15 bp, synthetic construct
  source 1..15: mol_type = other DNA
tagtctagagactgg

SEQ ID NO: 12688 - DNA, 15 bp, synthetic construct
  source 1..15: mol_type = other DNA
ggagcaggaagatgt

SEQ ID NO: 12689 - DNA, 15 bp, synthetic construct
  source 1..15: mol_type = other DNA
cttcaccttcttcgg

SEQ ID NO: 12690 - DNA, 15 bp, synthetic construct
  source 1..15: mol_type = other DNA
gaagtctctggtgta

SEQ ID NO: 12691 - DNA, 15 bp, synthetic construct
  source 1..15: mol_type = other DNA
actaatcccatctct

SEQ ID NO: 12692 - DNA, 15 bp, synthetic construct
  source 1..15: mol_type = other DNA
agggagatgcatgac

SEQ ID NO: 12693 - DNA, 15 bp, synthetic construct
  source 1..15: mol_type = other DNA
caggcgcttataggt

SEQ ID NO: 12694 - DNA, 15 bp, synthetic construct
  source 1..15: mol_type = other DNA
actggttctgcacat

SEQ ID NO: 12695 - DNA, 15 bp, synthetic construct
  source 1..15: mol_type = other DNA
gtgtatgggacggtg

SEQ ID NO: 12696 - DNA, 15 bp, synthetic construct
  source 1..15: mol_type = other DNA
aatcctatctgtctg

SEQ ID NO: 12697 - DNA, 15 bp, synthetic construct
  source 1..15: mol_type = other DNA
tctaaagccctgatg

SEQ ID NO: 12698 - DNA, 15 bp, synthetic construct
  source 1..15: mol_type = other DNA
actgtgtggatttta

SEQ ID NO: 12699 - DNA, 15 bp, synthetic construct
  source 1..15: mol_type = other DNA
aacagggcagtaaag

SEQ ID NO: 12700 - DNA, 15 bp, synthetic construct
  source 1..15: mol_type = other DNA
aaatggaggtctttg

SEQ ID NO: 12701 - DNA, 15 bp, synthetic construct
  source 1..15: mol_type = other DNA
tcctcaacccaggaa

SEQ ID NO: 12702 - DNA, 15 bp, synthetic construct
  source 1..15: mol_type = other DNA
ggaccctctttacac

SEQ ID NO: 12703 - DNA, 15 bp, synthetic construct
  source 1..15: mol_type = other DNA
ccagacgttctgtac

SEQ ID NO: 12704 - DNA, 15 bp, synthetic construct
  source 1..15: mol_type = other DNA
acaggaccattgtct

SEQ ID NO: 12705 - DNA, 15 bp, synthetic construct
  source 1..15: mol_type = other DNA
caatggccaatatcc

SEQ ID NO: 12706 - DNA, 15 bp, synthetic construct
  source 1..15: mol_type = other DNA
gtcaggaaatctcat

SEQ ID NO: 12707 - DNA, 15 bp, synthetic construct
  source 1..15: mol_type = other DNA
caatggccaatatcc

SEQ ID NO: 12708 - DNA, 15 bp, synthetic construct
  source 1..15: mol_type = other DNA
gtcaggaaatctcat

SEQ ID NO: 12709 - DNA, 15 bp, synthetic construct
  source 1..15: mol_type = other DNA
gagcctagaatgagc

SEQ ID NO: 12710 - DNA, 15 bp, synthetic construct
  source 1..15: mol_type = other DNA
gtagggtctgagatt

SEQ ID NO: 12711 - DNA, 15 bp, synthetic construct
  source 1..15: mol_type = other DNA
ggtgatgaccgaaag

SEQ ID NO: 12712 - DNA, 15 bp, synthetic construct
  source 1..15: mol_type = other DNA
aactcccatgttatt

SEQ ID NO: 12713 - DNA, 15 bp, synthetic construct
  source 1..15: mol_type = other DNA
cattgggtttcctgc

SEQ ID NO: 12714 - DNA, 15 bp, synthetic construct
  source 1..15: mol_type = other DNA
ggtccttacctgagt

SEQ ID NO: 12715 - DNA, 15 bp, synthetic construct
  source 1..15: mol_type = other DNA
cattgggtttcctgc

SEQ ID NO: 12716 - DNA, 15 bp, synthetic construct
  source 1..15: mol_type = other DNA
ggtccttacctgagt

SEQ ID NO: 12717 - DNA, 15 bp, synthetic construct
  source 1..15: mol_type = other DNA
attcttccattcggc

SEQ ID NO: 12718 - DNA, 15 bp, synthetic construct
  source 1..15: mol_type = other DNA
gtgttggtttacaaa

SEQ ID NO: 12719 - DNA, 15 bp, synthetic construct
  source 1..15: mol_type = other DNA
attcttccattcggc

SEQ ID NO: 12720 - DNA, 15 bp, synthetic construct
  source 1..15: mol_type = other DNA
gtgttggtttacaaa

SEQ ID NO: 12721 - DNA, 15 bp, synthetic construct
  source 1..15: mol_type = other DNA
tgtgtctaggtttct

SEQ ID NO: 12722 - DNA, 15 bp, synthetic construct
  source 1..15: mol_type = other DNA
gcagctttatgacta

SEQ ID NO: 12723 - DNA, 15 bp, synthetic construct
  source 1..15: mol_type = other DNA
tttcctcttcatcct

SEQ ID NO: 12724 - DNA, 15 bp, synthetic construct
  source 1..15: mol_type = other DNA
gaccttggctaaaat

SEQ ID NO: 12725 - DNA, 15 bp, synthetic construct
  source 1..15: mol_type = other DNA
ctgtagacagtcatc

SEQ ID NO: 12726 - DNA, 15 bp, synthetic construct
  source 1..15: mol_type = other DNA
actaactgtggagca

SEQ ID NO: 12727 - DNA, 15 bp, synthetic construct
  source 1..15: mol_type = other DNA
ttggagtgtttgcgc

SEQ ID NO: 12728 - DNA, 15 bp, synthetic construct
  source 1..15: mol_type = other DNA
ctcagctctttgcat

SEQ ID NO: 12729 - DNA, 15 bp, synthetic construct
  source 1..15: mol_type = other DNA
agtgtgttgtttatt

SEQ ID NO: 12730 - DNA, 15 bp, synthetic construct
  source 1..15: mol_type = other DNA
tacagtggaaagaac

SEQ ID NO: 12731 - DNA, 15 bp, synthetic construct
  source 1..15: mol_type = other DNA
tctttccactgtaag

SEQ ID NO: 12732 - DNA, 15 bp, synthetic construct
  source 1..15: mol_type = other DNA
ttgtcacgataaatg

SEQ ID NO: 12733 - DNA, 15 bp, synthetic construct
  source 1..15: mol_type = other DNA
tgaccatgaacctcc

SEQ ID NO: 12734 - DNA, 15 bp, synthetic construct
  source 1..15: mol_type = other DNA
atgtttttgaaatgc

SEQ ID NO: 12735 - DNA, 15 bp, synthetic construct
  source 1..15: mol_type = other DNA
tggtctggaactgag

SEQ ID NO: 12736 - DNA, 15 bp, synthetic construct
  source 1..15: mol_type = other DNA
tcgagtggtcatgat

SEQ ID NO: 12737 - DNA, 15 bp, synthetic construct
  source 1..15: mol_type = other DNA
ctttggccggtacgg

SEQ ID NO: 12738 - DNA, 15 bp, synthetic construct
  source 1..15: mol_type = other DNA
actagaaagatcgaa

SEQ ID NO: 12739 - DNA, 15 bp, synthetic construct
  source 1..15: mol_type = other DNA
acggatgtgtacaga

SEQ ID NO: 12740 - DNA, 15 bp, synthetic construct
  source 1..15: mol_type = other DNA
tctgatccacgtaaa

SEQ ID NO: 12741 - DNA, 15 bp, synthetic construct
  source 1..15: mol_type = other DNA
cctgaagcgtacagc

SEQ ID NO: 12742 - DNA, 15 bp, synthetic construct
  source 1..15: mol_type = other DNA
acctacctagttggc

SEQ ID NO: 12743 - DNA, 15 bp, synthetic construct
  source 1..15: mol_type = other DNA
ggagtgccccgttgc

SEQ ID NO: 12744 - DNA, 15 bp, synthetic construct
  source 1..15: mol_type = other DNA
tgccctcacccagat

SEQ ID NO: 12745 - DNA, 15 bp, synthetic construct
  source 1..15: mol_type = other DNA
agggctttctccacc

SEQ ID NO: 12746 - DNA, 15 bp, synthetic construct
  source 1..15: mol_type = other DNA
cactccatatctaag

SEQ ID NO: 12747 - DNA, 15 bp, synthetic construct
  source 1..15: mol_type = other DNA
ggaatatgccaaaca

SEQ ID NO: 12748 - DNA, 15 bp, synthetic construct
  source 1..15: mol_type = other DNA
tctttgttggcactc

SEQ ID NO: 12749 - DNA, 15 bp, synthetic construct
  source 1..15: mol_type = other DNA
aacaagggcatctca

SEQ ID NO: 12750 - DNA, 15 bp, synthetic construct
  source 1..15: mol_type = other DNA
tttggccttctcgaa

SEQ ID NO: 12751 - DNA, 15 bp, synthetic construct
  source 1..15: mol_type = other DNA
aacaagggcatctca

SEQ ID NO: 12752 - DNA, 15 bp, synthetic construct
  source 1..15: mol_type = other DNA
tttggccttctcgaa

SEQ ID NO: 12753 - DNA, 15 bp, synthetic construct
  source 1..15: mol_type = other DNA
actcctccataggtg

SEQ ID NO: 12754 - DNA, 15 bp, synthetic construct
  source 1..15: mol_type = other DNA
ctataggcccaacag

SEQ ID NO: 12755 - DNA, 15 bp, synthetic construct
  source 1..15: mol_type = other DNA
aacacgctcttgaca

SEQ ID NO: 12756 - DNA, 15 bp, synthetic construct
  source 1..15: mol_type = other DNA
gccacttcaactacg

SEQ ID NO: 12757 - DNA, 15 bp, synthetic construct
  source 1..15: mol_type = other DNA
atggccatgtagatg

SEQ ID NO: 12758 - DNA, 15 bp, synthetic construct
  source 1..15: mol_type = other DNA
gaaggacctgttccg

SEQ ID NO: 12759 - DNA, 15 bp, synthetic construct
  source 1..15: mol_type = other DNA
aggagcactcgatga

SEQ ID NO: 12760 - DNA, 15 bp, synthetic construct
  source 1..15: mol_type = other DNA
tctgtacttggtgta

SEQ ID NO: 12761 - DNA, 15 bp, synthetic construct
  source 1..15: mol_type = other DNA
aagatgtagtagccc

SEQ ID NO: 12762 - DNA, 15 bp, synthetic construct
  source 1..15: mol_type = other DNA
ggtgcttttattcac

SEQ ID NO: 12763 - DNA, 15 bp, synthetic construct
  source 1..15: mol_type = other DNA
agaaagcttagcatg

SEQ ID NO: 12764 - DNA, 15 bp, synthetic construct
  source 1..15: mol_type = other DNA
tttccccgaggtcca

SEQ ID NO: 12765 - DNA, 15 bp, synthetic construct
  source 1..15: mol_type = other DNA
gtcatgggaatacgc

SEQ ID NO: 12766 - DNA, 15 bp, synthetic construct
  source 1..15: mol_type = other DNA
gggcatcgagtttaa

SEQ ID NO: 12767 - DNA, 15 bp, synthetic construct
  source 1..15: mol_type = other DNA
agcttgaagtcaaac

SEQ ID NO: 12768 - DNA, 15 bp, synthetic construct
  source 1..15: mol_type = other DNA
cgttaccctttagga

SEQ ID NO: 12769 - DNA, 15 bp, synthetic construct
  source 1..15: mol_type = other DNA
gcactttctacatca

SEQ ID NO: 12770 - DNA, 15 bp, synthetic construct
  source 1..15: mol_type = other DNA
cttcgacaactggat

SEQ ID NO: 12771 - DNA, 15 bp, synthetic construct
  source 1..15: mol_type = other DNA
agcccttgaccatgg

SEQ ID NO: 12772 - DNA, 15 bp, synthetic construct
  source 1..15: mol_type = other DNA
tctgaatccttcatc

SEQ ID NO: 12773 - DNA, 15 bp, synthetic construct
  source 1..15: mol_type = other DNA
agggatgagaacggg

SEQ ID NO: 12774 - DNA, 15 bp, synthetic construct
  source 1..15: mol_type = other DNA
tgcttcaggaagaaa

SEQ ID NO: 12775 - DNA, 15 bp, synthetic construct
  source 1..15: mol_type = other DNA
gctgatgtgacaggt

SEQ ID NO: 12776 - DNA, 15 bp, synthetic construct
  source 1..15: mol_type = other DNA
ctccacctataacga

SEQ ID NO: 12777 - DNA, 15 bp, synthetic construct
  source 1..15: mol_type = other DNA
acccacaaggtatag

SEQ ID NO: 12778 - DNA, 15 bp, synthetic construct
  source 1..15: mol_type = other DNA
tcctactgctgttcg

SEQ ID NO: 12779 - DNA, 15 bp, synthetic construct
  source 1..15: mol_type = other DNA
gatgaagtagtagac

SEQ ID NO: 12780 - DNA, 15 bp, synthetic construct
  source 1..15: mol_type = other DNA
gcaggcatgttgagt

SEQ ID NO: 12781 - DNA, 15 bp, synthetic construct
  source 1..15: mol_type = other DNA
ccatacaattccaaa

SEQ ID NO: 12782 - DNA, 15 bp, synthetic construct
  source 1..15: mol_type = other DNA
ggtggtgtctgttat

SEQ ID NO: 12783 - DNA, 15 bp, synthetic construct
  source 1..15: mol_type = other DNA
caagtggacactgga

SEQ ID NO: 12784 - DNA, 15 bp, synthetic construct
  source 1..15: mol_type = other DNA
aggattgcacggata

SEQ ID NO: 12785 - DNA, 15 bp, synthetic construct
  source 1..15: mol_type = other DNA
tctttctgggagtac

SEQ ID NO: 12786 - DNA, 15 bp, synthetic construct
  source 1..15: mol_type = other DNA
caggcagctctacat

SEQ ID NO: 12787 - DNA, 15 bp, synthetic construct
  source 1..15: mol_type = other DNA
caaacttgaggagtg

SEQ ID NO: 12788 - DNA, 15 bp, synthetic construct
  source 1..15: mol_type = other DNA
actaccattgtagcc

SEQ ID NO: 12789 - DNA, 15 bp, synthetic construct
  source 1..15: mol_type = other DNA
agagtgaaagcatcc

SEQ ID NO: 12790 - DNA, 15 bp, synthetic construct
  source 1..15: mol_type = other DNA
ttaggagtgggcaag

SEQ ID NO: 12791 - DNA, 15 bp, synthetic construct
  source 1..15: mol_type = other DNA
acttgtgggaaatgc

SEQ ID NO: 12792 - DNA, 15 bp, synthetic construct
  source 1..15: mol_type = other DNA
gacagatcagaacaa

SEQ ID NO: 12793 - DNA, 15 bp, synthetic construct
  source 1..15: mol_type = other DNA
agcggcaacttcttg

SEQ ID NO: 12794 - DNA, 15 bp, synthetic construct
  source 1..15: mol_type = other DNA
tagccaaagtcttgt

SEQ ID NO: 12795 - DNA, 15 bp, synthetic construct
  source 1..15: mol_type = other DNA
ctcacactcacaagc

SEQ ID NO: 12796 - DNA, 15 bp, synthetic construct
  source 1..15: mol_type = other DNA
gatcaccacggtgac

SEQ ID NO: 12797 - DNA, 15 bp, synthetic construct
  source 1..15: mol_type = other DNA
gtgtctgatatgaca

SEQ ID NO: 12798 - DNA, 15 bp, synthetic construct
  source 1..15: mol_type = other DNA
agagctccagataaa

SEQ ID NO: 12799 - DNA, 15 bp, synthetic construct
  source 1..15: mol_type = other DNA
ccatttgaagtctct

SEQ ID NO: 12800 - DNA, 15 bp, synthetic construct
  source 1..15: mol_type = other DNA
ccctaccttgtaata

SEQ ID NO: 12801 - DNA, 15 bp, synthetic construct
  source 1..15: mol_type = other DNA
tgctttcagagacta

SEQ ID NO: 12802 - DNA, 15 bp, synthetic construct
  source 1..15: mol_type = other DNA
cttgctgcttctatt

SEQ ID NO: 12803 - DNA, 15 bp, synthetic construct
  source 1..15: mol_type = other DNA
gaaaggatctgagtc

SEQ ID NO: 12804 - DNA, 15 bp, synthetic construct
  source 1..15: mol_type = other DNA
tgtttataggaagaa

SEQ ID NO: 12805 - DNA, 15 bp, synthetic construct
  source 1..15: mol_type = other DNA
tgattaaggagctga

SEQ ID NO: 12806 - DNA, 15 bp, synthetic construct
  source 1..15: mol_type = other DNA
acccctttgtcttct

SEQ ID NO: 12807 - DNA, 15 bp, synthetic construct
  source 1..15: mol_type = other DNA
gtgtcttttctcagt

SEQ ID NO: 12808 - DNA, 15 bp, synthetic construct
  source 1..15: mol_type = other DNA
cagtgttctcattga

SEQ ID NO: 12809 - DNA, 15 bp, synthetic construct
  source 1..15: mol_type = other DNA
ataagccagttcaca

SEQ ID NO: 12810 - DNA, 15 bp, synthetic construct
  source 1..15: mol_type = other DNA
acgaatgggtttatg

SEQ ID NO: 12811 - DNA, 15 bp, synthetic construct
  source 1..15: mol_type = other DNA
tcgtattggttaggg

SEQ ID NO: 12812 - DNA, 15 bp, synthetic construct
  source 1..15: mol_type = other DNA
aggagagggtgattg

SEQ ID NO: 12813 - DNA, 15 bp, synthetic construct
  source 1..15: mol_type = other DNA
agtctgtgatgttgt

SEQ ID NO: 12814 - DNA, 15 bp, synthetic construct
  source 1..15: mol_type = other DNA
ctcaacttcattatc

SEQ ID NO: 12815 - DNA, 15 bp, synthetic construct
  source 1..15: mol_type = other DNA
tgttaacaggatgtg

SEQ ID NO: 12816 - DNA, 15 bp, synthetic construct
  source 1..15: mol_type = other DNA
ggctaagaagatgaa

SEQ ID NO: 12817 - DNA, 15 bp, synthetic construct
  source 1..15: mol_type = other DNA
gtccttgctctgact

SEQ ID NO: 12818 - DNA, 15 bp, synthetic construct
  source 1..15: mol_type = other DNA
taccctaaagtacag

SEQ ID NO: 12819 - DNA, 15 bp, synthetic construct
  source 1..15: mol_type = other DNA
catgatttgaaagat

SEQ ID NO: 12820 - DNA, 15 bp, synthetic construct
  source 1..15: mol_type = other DNA
ccaccagaagtcatc

SEQ ID NO: 12821 - DNA, 15 bp, synthetic construct
  source 1..15: mol_type = other DNA
ttccatccaaatcag

SEQ ID NO: 12822 - DNA, 15 bp, synthetic construct
  source 1..15: mol_type = other DNA
tggttctttcctctc

SEQ ID NO: 12823 - DNA, 15 bp, synthetic construct
  source 1..15: mol_type = other DNA
cctcatcattccttc

SEQ ID NO: 12824 - DNA, 15 bp, synthetic construct
  source 1..15: mol_type = other DNA
ccaagcttggtcttg

SEQ ID NO: 12825 - DNA, 15 bp, synthetic construct
  source 1..15: mol_type = other DNA
gtttgacacagagca

SEQ ID NO: 12826 - DNA, 15 bp, synthetic construct
  source 1..15: mol_type = other DNA
ggcatccaaaagagc

SEQ ID NO: 12827 - DNA, 15 bp, synthetic construct
  source 1..15: mol_type = other DNA
gccacacttggatct

SEQ ID NO: 12828 - DNA, 15 bp, synthetic construct
  source 1..15: mol_type = other DNA
cattcataagaatac

SEQ ID NO: 12829 - DNA, 15 bp, synthetic construct
  source 1..15: mol_type = other DNA
gcttcatgatcatag

SEQ ID NO: 12830 - DNA, 15 bp, synthetic construct
  source 1..15: mol_type = other DNA
tggagctttcgattt

SEQ ID NO: 12831 - DNA, 15 bp, synthetic construct
  source 1..15: mol_type = other DNA
ccgttctctatctcc

SEQ ID NO: 12832 - DNA, 15 bp, synthetic construct
  source 1..15: mol_type = other DNA
ttgagccaggatgat

SEQ ID NO: 12833 - DNA, 15 bp, synthetic construct
  source 1..15: mol_type = other DNA
agattacctcttgta

SEQ ID NO: 12834 - DNA, 15 bp, synthetic construct
  source 1..15: mol_type = other DNA
gtggatatactgtaa

SEQ ID NO: 12835 - DNA, 15 bp, synthetic construct
  source 1..15: mol_type = other DNA
attatgactcctcac

SEQ ID NO: 12836 - DNA, 15 bp, synthetic construct
  source 1..15: mol_type = other DNA
catcacgttgagttc

SEQ ID NO: 12837 - DNA, 15 bp, synthetic construct
  source 1..15: mol_type = other DNA
aactccaacaactct

SEQ ID NO: 12838 - DNA, 15 bp, synthetic construct
  source 1..15: mol_type = other DNA
tcatttccacccttc

SEQ ID NO: 12839 - DNA, 15 bp, synthetic construct
  source 1..15: mol_type = other DNA
tgtaaaaggcttgag

SEQ ID NO: 12840 - DNA, 15 bp, synthetic construct
  source 1..15: mol_type = other DNA
cttccatccttcctg

SEQ ID NO: 12841 - DNA, 15 bp, synthetic construct
  source 1..15: mol_type = other DNA
gaaaaagacaaactt

SEQ ID NO: 12842 - DNA, 15 bp, synthetic construct
  source 1..15: mol_type = other DNA
ttctgacaacgtgtg

SEQ ID NO: 12843 - DNA, 15 bp, synthetic construct
  source 1..15: mol_type = other DNA
cagggctgaagaggc

SEQ ID NO: 12844 - DNA, 15 bp, synthetic construct
  source 1..15: mol_type = other DNA
tttaatagtgaacac

SEQ ID NO: 12845 - DNA, 15 bp, synthetic construct
  source 1..15: mol_type = other DNA
agtaggagcctttgc

SEQ ID NO: 12846 - DNA, 15 bp, synthetic construct
  source 1..15: mol_type = other DNA
atgggaccttaggga

SEQ ID NO: 12847 - DNA, 15 bp, synthetic construct
  source 1..15: mol_type = other DNA
tactgcccagtaaga

SEQ ID NO: 12848 - DNA, 15 bp, synthetic construct
  source 1..15: mol_type = other DNA
gattgttatgtccag

SEQ ID NO: 12849 - DNA, 15 bp, synthetic construct
  source 1..15: mol_type = other DNA
tttcaaggaactcag

SEQ ID NO: 12850 - DNA, 15 bp, synthetic construct
  source 1..15: mol_type = other DNA
tctttaaagctcacc

SEQ ID NO: 12851 - DNA, 15 bp, synthetic construct
  source 1..15: mol_type = other DNA
tgttgagcctttcat

SEQ ID NO: 12852 - DNA, 15 bp, synthetic construct
  source 1..15: mol_type = other DNA
tgggagtcttcgagt

SEQ ID NO: 12853 - DNA, 15 bp, synthetic construct
  source 1..15: mol_type = other DNA
ttcttcattctttaa

SEQ ID NO: 12854 - DNA, 15 bp, synthetic construct
  source 1..15: mol_type = other DNA
tgcttgttatttgct

SEQ ID NO: 12855 - DNA, 15 bp, synthetic construct
  source 1..15: mol_type = other DNA
ttcagtccatgcaaa

SEQ ID NO: 12856 - DNA, 15 bp, synthetic construct
  source 1..15: mol_type = other DNA
tggttgttcctctct

SEQ ID NO: 12857 - DNA, 15 bp, synthetic construct
  source 1..15: mol_type = other DNA
ttcctctaatggata

SEQ ID NO: 12858 - DNA, 15 bp, synthetic construct
  source 1..15: mol_type = other DNA
cccataatttagtca

SEQ ID NO: 12859 - DNA, 15 bp, synthetic construct
  source 1..15: mol_type = other DNA
tttcccatctggcac

SEQ ID NO: 12860 - DNA, 15 bp, synthetic construct
  source 1..15: mol_type = other DNA
ctaccagaacttaac

SEQ ID NO: 12861 - DNA, 15 bp, synthetic construct
  source 1..15: mol_type = other DNA
tcctcatgaatttgg

SEQ ID NO: 12862 - DNA, 15 bp, synthetic construct
  source 1..15: mol_type = other DNA
ttccagcctcaaaat

SEQ ID NO: 12863 - DNA, 15 bp, synthetic construct
  source 1..15: mol_type = other DNA
atacttctgacttcc

SEQ ID NO: 12864 - DNA, 15 bp, synthetic construct
  source 1..15: mol_type = other DNA
ctttataagccatca

SEQ ID NO: 12865 - DNA, 15 bp, synthetic construct
  source 1..15: mol_type = other DNA
tccctagtgtgaagg

SEQ ID NO: 12866 - DNA, 15 bp, synthetic construct
  source 1..15: mol_type = other DNA
aaagggaggcaggtg

SEQ ID NO: 12867 - DNA, 15 bp, synthetic construct
  source 1..15: mol_type = other DNA
agaatgtctaaggtg

SEQ ID NO: 12868 - DNA, 15 bp, synthetic construct
  source 1..15: mol_type = other DNA
ggtcctgaaagtaag

SEQ ID NO: 12869 - DNA, 15 bp, synthetic construct
  source 1..15: mol_type = other DNA
ttccaaaaatgtcaa

SEQ ID NO: 12870 - DNA, 15 bp, synthetic construct
  source 1..15: mol_type = other DNA
tttggttgaacaaca

SEQ ID NO: 12871 - DNA, 15 bp, synthetic construct
  source 1..15: mol_type = other DNA
gagacataccgcttt

SEQ ID NO: 12872 - DNA, 15 bp, synthetic construct
  source 1..15: mol_type = other DNA
actgcttgtgtgaac

SEQ ID NO: 12873 - DNA, 15 bp, synthetic construct
  source 1..15: mol_type = other DNA
cttgtgaaaataaca

SEQ ID NO: 12874 - DNA, 15 bp, synthetic construct
  source 1..15: mol_type = other DNA
cagtcatttagtgtc

SEQ ID NO: 12875 - DNA, 15 bp, synthetic construct
  source 1..15: mol_type = other DNA
tcaatgcttcaggtt

SEQ ID NO: 12876 - DNA, 15 bp, synthetic construct
  source 1..15: mol_type = other DNA
tttcactaaagagag

SEQ ID NO: 12877 - DNA, 15 bp, synthetic construct
  source 1..15: mol_type = other DNA
gaattggaggaagag

SEQ ID NO: 12878 - DNA, 15 bp, synthetic construct
  source 1..15: mol_type = other DNA
tacgaagtgattatg

SEQ ID NO: 12879 - DNA, 15 bp, synthetic construct
  source 1..15: mol_type = other DNA
tctgtctatcctgta

SEQ ID NO: 12880 - DNA, 15 bp, synthetic construct
  source 1..15: mol_type = other DNA
tagtgagtcctctga

SEQ ID NO: 12881 - DNA, 15 bp, synthetic construct
  source 1..15: mol_type = other DNA
ctgactcagttcaca

SEQ ID NO: 12882 - DNA, 15 bp, synthetic construct
  source 1..15: mol_type = other DNA
agagaaccctgatac

SEQ ID NO: 12883 - DNA, 15 bp, synthetic construct
  source 1..15: mol_type = other DNA
tgttctaatttgagg

SEQ ID NO: 12884 - DNA, 15 bp, synthetic construct
  source 1..15: mol_type = other DNA
tgtctctgacaaaat

SEQ ID NO: 12885 - DNA, 15 bp, synthetic construct
  source 1..15: mol_type = other DNA
caactacagtgcagt

SEQ ID NO: 12886 - DNA, 15 bp, synthetic construct
  source 1..15: mol_type = other DNA
tgtcagaaacttacg

SEQ ID NO: 12887 - DNA, 15 bp, synthetic construct
  source 1..15: mol_type = other DNA
tcggagtggttgatc

SEQ ID NO: 12888 - DNA, 15 bp, synthetic construct
  source 1..15: mol_type = other DNA
atatactacctgtct

SEQ ID NO: 12889 - DNA, 15 bp, synthetic construct
  source 1..15: mol_type = other DNA
agccatggacctatc

SEQ ID NO: 12890 - DNA, 15 bp, synthetic construct
  source 1..15: mol_type = other DNA
tagatatggctgtgc

SEQ ID NO: 12891 - DNA, 15 bp, synthetic construct
  source 1..15: mol_type = other DNA
tgaactctaccaatt

SEQ ID NO: 12892 - DNA, 15 bp, synthetic construct
  source 1..15: mol_type = other DNA
atcctattagcaact

SEQ ID NO: 12893 - DNA, 15 bp, synthetic construct
  source 1..15: mol_type = other DNA
acaacacttattgct

SEQ ID NO: 12894 - DNA, 15 bp, synthetic construct
  source 1..15: mol_type = other DNA
gaagattgcaaagcc

SEQ ID NO: 12895 - DNA, 15 bp, synthetic construct
  source 1..15: mol_type = other DNA
agcgtaacgtgtagt

SEQ ID NO: 12896 - DNA, 15 bp, synthetic construct
  source 1..15: mol_type = other DNA
tttcttggattcctc

SEQ ID NO: 12897 - DNA, 15 bp, synthetic construct
  source 1..15: mol_type = other DNA
cttacaccctgctct

SEQ ID NO: 12898 - DNA, 15 bp, synthetic construct
  source 1..15: mol_type = other DNA
aggaagagtcgcttt

SEQ ID NO: 12899 - DNA, 15 bp, synthetic construct
  source 1..15: mol_type = other DNA
caaatggctgatgcc

SEQ ID NO: 12900 - DNA, 15 bp, synthetic construct
  source 1..15: mol_type = other DNA
ctgtgaatttgtatt

SEQ ID NO: 12901 - DNA, 15 bp, synthetic construct
  source 1..15: mol_type = other DNA
gccaatagcagagtc

SEQ ID NO: 12902 - DNA, 15 bp, synthetic construct
  source 1..15: mol_type = other DNA
catctaaaatcagac

SEQ ID NO: 12903 - DNA, 15 bp, synthetic construct
  source 1..15: mol_type = other DNA
cctagctgctaggga

SEQ ID NO: 12904 - DNA, 15 bp, synthetic construct
  source 1..15: mol_type = other DNA
cgcacccaactatgt

SEQ ID NO: 12905 - DNA, 15 bp, synthetic construct
  source 1..15: mol_type = other DNA
gaccacttaggtgta

SEQ ID NO: 12906 - DNA, 15 bp, synthetic construct
  source 1..15: mol_type = other DNA
tgtgtcagtgtgctt

SEQ ID NO: 12907 - DNA, 15 bp, synthetic construct
  source 1..15: mol_type = other DNA
tgtgggcctcgatga

SEQ ID NO: 12908 - DNA, 15 bp, synthetic construct
  source 1..15: mol_type = other DNA
ctcagccagttctaa

SEQ ID NO: 12909 - DNA, 15 bp, synthetic construct
  source 1..15: mol_type = other DNA
atatgccaaaatgct

SEQ ID NO: 12910 - DNA, 15 bp, synthetic construct
  source 1..15: mol_type = other DNA
ttcacctgaactctg

SEQ ID NO: 12911 - DNA, 15 bp, synthetic construct
  source 1..15: mol_type = other DNA
taggaaatgcttcaa

SEQ ID NO: 12912 - DNA, 15 bp, synthetic construct
  source 1..15: mol_type = other DNA
cccaaggcctcaatg

SEQ ID NO: 12913 - DNA, 15 bp, synthetic construct
  source 1..15: mol_type = other DNA
ccaatatggcaatca

SEQ ID NO: 12914 - DNA, 15 bp, synthetic construct
  source 1..15: mol_type = other DNA
aagatttagtagctt

SEQ ID NO: 12915 - DNA, 15 bp, synthetic construct
  source 1..15: mol_type = other DNA
gtgcctaagtccttt

SEQ ID NO: 12916 - DNA, 15 bp, synthetic construct
  source 1..15: mol_type = other DNA
agttccctagttctc

SEQ ID NO: 12917 - DNA, 15 bp, synthetic construct
  source 1..15: mol_type = other DNA
ggttttctaaacacc

SEQ ID NO: 12918 - DNA, 15 bp, synthetic construct
  source 1..15: mol_type = other DNA
ctagttttagcacat

SEQ ID NO: 12919 - DNA, 15 bp, synthetic construct
  source 1..15: mol_type = other DNA
caagcaagccaccaa

SEQ ID NO: 12920 - DNA, 15 bp, synthetic construct
  source 1..15: mol_type = other DNA
tttcatttaccctga

SEQ ID NO: 12921 - DNA, 15 bp, synthetic construct
  source 1..15: mol_type = other DNA
acagtcaaataaatt

SEQ ID NO: 12922 - DNA, 15 bp, synthetic construct
  source 1..15: mol_type = other DNA
actccatcagctggt

SEQ ID NO: 12923 - DNA, 15 bp, synthetic construct
  source 1..15: mol_type = other DNA
acatctccaatcatt

SEQ ID NO: 12924 - DNA, 15 bp, synthetic construct
  source 1..15: mol_type = other DNA
gatgttccgatgaag

SEQ ID NO: 12925 - DNA, 15 bp, synthetic construct
  source 1..15: mol_type = other DNA
gagtgctttaaacat

SEQ ID NO: 12926 - DNA, 15 bp, synthetic construct
  source 1..15: mol_type = other DNA
aattactccagctca

SEQ ID NO: 12927 - DNA, 15 bp, synthetic construct
  source 1..15: mol_type = other DNA
gaaaatctctggaaa

SEQ ID NO: 12928 - DNA, 15 bp, synthetic construct
  source 1..15: mol_type = other DNA
ctgttttaaagacca

SEQ ID NO: 12929 - DNA, 15 bp, synthetic construct
  source 1..15: mol_type = other DNA
atttttaatatcagt

SEQ ID NO: 12930 - DNA, 15 bp, synthetic construct
  source 1..15: mol_type = other DNA
atgtcagtccattta

SEQ ID NO: 12931 - DNA, 15 bp, synthetic construct
  source 1..15: mol_type = other DNA
taacaactggcgaaa

SEQ ID NO: 12932 - DNA, 15 bp, synthetic construct
  source 1..15: mol_type = other DNA
gcaattggttttcgg

SEQ ID NO: 12933 - DNA, 15 bp, synthetic construct
  source 1..15: mol_type = other DNA
ttgagaagagtcacc

SEQ ID NO: 12934 - DNA, 15 bp, synthetic construct
  source 1..15: mol_type = other DNA
ttaaatagctgactg

SEQ ID NO: 12935 - DNA, 15 bp, synthetic construct
  source 1..15: mol_type = other DNA
tcaagtggacaaata

SEQ ID NO: 12936 - DNA, 15 bp, synthetic construct
  source 1..15: mol_type = other DNA
agtttttccgcattg

SEQ ID NO: 12937 - DNA, 15 bp, synthetic construct
  source 1..15: mol_type = other DNA
ttgaagttcactctc

SEQ ID NO: 12938 - DNA, 15 bp, synthetic construct
  source 1..15: mol_type = other DNA
gttccaaatgagaga

SEQ ID NO: 12939 - DNA, 15 bp, synthetic construct
  source 1..15: mol_type = other DNA
tagttcaagaaccta

SEQ ID NO: 12940 - DNA, 15 bp, synthetic construct
  source 1..15: mol_type = other DNA
caggttgggcacaat

SEQ ID NO: 12941 - DNA, 15 bp, synthetic construct
  source 1..15: mol_type = other DNA
tgatattgtcttgga

SEQ ID NO: 12942 - DNA, 15 bp, synthetic construct
  source 1..15: mol_type = other DNA
gtcactgatttgtct

SEQ ID NO: 12943 - DNA, 15 bp, synthetic construct
  source 1..15: mol_type = other DNA
acttgctaaaattgc

SEQ ID NO: 12944 - DNA, 15 bp, synthetic construct
  source 1..15: mol_type = other DNA
ttagacgaaatggct

SEQ ID NO: 12945 - DNA, 15 bp, synthetic construct
  source 1..15: mol_type = other DNA
actgcttctctttaa

SEQ ID NO: 12946 - DNA, 15 bp, synthetic construct
  source 1..15: mol_type = other DNA
gttttcctactttga

SEQ ID NO: 12947 - DNA, 15 bp, synthetic construct
  source 1..15: mol_type = other DNA
ccttgttcatctctg

SEQ ID NO: 12948 - DNA, 15 bp, synthetic construct
  source 1..15: mol_type = other DNA
gtttatgcatttcct

SEQ ID NO: 12949 - DNA, 15 bp, synthetic construct
  source 1..15: mol_type = other DNA
cccttggaatagtta

SEQ ID NO: 12950 - DNA, 15 bp, synthetic construct
  source 1..15: mol_type = other DNA
gttgaagagagtttt

SEQ ID NO: 12951 - DNA, 15 bp, synthetic construct
  source 1..15: mol_type = other DNA
tggcaattaacatat

SEQ ID NO: 12952 - DNA, 15 bp, synthetic construct
  source 1..15: mol_type = other DNA
tcacttttattatgg

SEQ ID NO: 12953 - DNA, 15 bp, synthetic construct
  source 1..15: mol_type = other DNA
actagagatgaagtc

SEQ ID NO: 12954 - DNA, 15 bp, synthetic construct
  source 1..15: mol_type = other DNA
agatatcacttggaa

SEQ ID NO: 12955 - DNA, 15 bp, synthetic construct
  source 1..15: mol_type = other DNA
agtaggagtagagat

SEQ ID NO: 12956 - DNA, 15 bp, synthetic construct
  source 1..15: mol_type = other DNA
tttgctttttcctag

SEQ ID NO: 12957 - DNA, 15 bp, synthetic construct
  source 1..15: mol_type = other DNA
aaagaccttcagata

SEQ ID NO: 12958 - DNA, 15 bp, synthetic construct
  source 1..15: mol_type = other DNA
tgttctcaataaact

SEQ ID NO: 12959 - DNA, 15 bp, synthetic construct
  source 1..15: mol_type = other DNA
atacagatgttggaa

SEQ ID NO: 12960 - DNA, 15 bp, synthetic construct
  source 1..15: mol_type = other DNA
gcatcattcattgcg

SEQ ID NO: 12961 - DNA, 15 bp, synthetic construct
  source 1..15: mol_type = other DNA
tatttcacattgtct

SEQ ID NO: 12962 - DNA, 15 bp, synthetic construct
  source 1..15: mol_type = other DNA
ttttaacccctttct

SEQ ID NO: 12963 - DNA, 15 bp, synthetic construct
  source 1..15: mol_type = other DNA
gtccaactgctaaga

SEQ ID NO: 12964 - DNA, 15 bp, synthetic construct
  source 1..15: mol_type = other DNA
tgcgtggaccattca

SEQ ID NO: 12965 - DNA, 15 bp, synthetic construct
  source 1..15: mol_type = other DNA
tagcagtcccagaaa

SEQ ID NO: 12966 - DNA, 15 bp, synthetic construct
  source 1..15: mol_type = other DNA
acaaaattttgtaac

SEQ ID NO: 12967 - DNA, 15 bp, synthetic construct
  source 1..15: mol_type = other DNA
gaggtccaggcttca

SEQ ID NO: 12968 - DNA, 15 bp, synthetic construct
  source 1..15: mol_type = other DNA
atcgtttatgctgaa

SEQ ID NO: 12969 - DNA, 15 bp, synthetic construct
  source 1..15: mol_type = other DNA
atgtaaacgggcttc

SEQ ID NO: 12970 - DNA, 15 bp, synthetic construct
  source 1..15: mol_type = other DNA
tccattattgctttt

SEQ ID NO: 12971 - DNA, 15 bp, synthetic construct
  source 1..15: mol_type = other DNA
gactctggcttgtgg

SEQ ID NO: 12972 - DNA, 15 bp, synthetic construct
  source 1..15: mol_type = other DNA
attgaacggcctcat

SEQ ID NO: 12973 - DNA, 15 bp, synthetic construct
  source 1..15: mol_type = other DNA
aacgagtcatgcttc

SEQ ID NO: 12974 - DNA, 15 bp, synthetic construct
  source 1..15: mol_type = other DNA
tcagtcatccggctt

SEQ ID NO: 12975 - DNA, 15 bp, synthetic construct
  source 1..15: mol_type = other DNA
catcttcatcatagg

SEQ ID NO: 12976 - DNA, 15 bp, synthetic construct
  source 1..15: mol_type = other DNA
gtgtggattacatgg

SEQ ID NO: 12977 - DNA, 15 bp, synthetic construct
  source 1..15: mol_type = other DNA
atccgaacataacct

SEQ ID NO: 12978 - DNA, 15 bp, synthetic construct
  source 1..15: mol_type = other DNA
atcgctccacaagcc

SEQ ID NO: 12979 - DNA, 15 bp, synthetic construct
  source 1..15: mol_type = other DNA
tggcattcttctaac

SEQ ID NO: 12980 - DNA, 15 bp, synthetic construct
  source 1..15: mol_type = other DNA
ttggcacactaaaat

SEQ ID NO: 12981 - DNA, 15 bp, synthetic construct
  source 1..15: mol_type = other DNA
gtcctaggaggtaca

SEQ ID NO: 12982 - DNA, 15 bp, synthetic construct
  source 1..15: mol_type = other DNA
agccaggactatctg

SEQ ID NO: 12983 - DNA, 15 bp, synthetic construct
  source 1..15: mol_type = other DNA
gccgtagcaaggcag

SEQ ID NO: 12984 - DNA, 15 bp, synthetic construct
  source 1..15: mol_type = other DNA
cccaggtccagttcg

SEQ ID NO: 12985 - DNA, 15 bp, synthetic construct
  source 1..15: mol_type = other DNA
ctccgtcgccatagc

SEQ ID NO: 12986 - DNA, 15 bp, synthetic construct
  source 1..15: mol_type = other DNA
acatcaacccgaagt

SEQ ID NO: 12987 - DNA, 15 bp, synthetic construct
  source 1..15: mol_type = other DNA
ttcatcttcactact

SEQ ID NO: 12988 - DNA, 15 bp, synthetic construct
  source 1..15: mol_type = other DNA
ttcctgcgtcggatc

SEQ ID NO: 12989 - DNA, 15 bp, synthetic construct
  source 1..15: mol_type = other DNA
ttggatgacggcaac

SEQ ID NO: 12990 - DNA, 15 bp, synthetic construct
  source 1..15: mol_type = other DNA
gagaagtggagacag

SEQ ID NO: 12991 - DNA, 15 bp, synthetic construct
  source 1..15: mol_type = other DNA
atgtaagtgggaata

SEQ ID NO: 12992 - DNA, 15 bp, synthetic construct
  source 1..15: mol_type = other DNA
gtcgcagcttgaaaa

SEQ ID NO: 12993 - DNA, 15 bp, synthetic construct
  source 1..15: mol_type = other DNA
gacacaaaagataaa

SEQ ID NO: 12994 - DNA, 15 bp, synthetic construct
  source 1..15: mol_type = other DNA
attggtgcgaatact

SEQ ID NO: 12995 - DNA, 15 bp, synthetic construct
  source 1..15: mol_type = other DNA
gttctctttaccaag

SEQ ID NO: 12996 - DNA, 15 bp, synthetic construct
  source 1..15: mol_type = other DNA
atacctttctccaat

SEQ ID NO: 12997 - DNA, 15 bp, synthetic construct
  source 1..15: mol_type = other DNA
taaaatgcaatccac

SEQ ID NO: 12998 - DNA, 15 bp, synthetic construct
  source 1..15: mol_type = other DNA
attctgaagtttggg

SEQ ID NO: 12999 - DNA, 15 bp, synthetic construct
  source 1..15: mol_type = other DNA
tcaggaatggagcag

SEQ ID NO: 13000 - DNA, 15 bp, synthetic construct
  source 1..15: mol_type = other DNA
tccaaaagtatttga

SEQ ID NO: 13001 - DNA, 15 bp, synthetic construct
  source 1..15: mol_type = other DNA
tgttttgtattcatt

SEQ ID NO: 13002 - DNA, 15 bp, synthetic construct
  source 1..15: mol_type = other DNA
gtaaaaattgaatcc

SEQ ID NO: 13003 - DNA, 15 bp, synthetic construct
  source 1..15: mol_type = other DNA
gaacattttgattat

SEQ ID NO: 13004 - DNA, 15 bp, synthetic construct
  source 1..15: mol_type = other DNA
aattccaaaagttca

SEQ ID NO: 13005 - DNA, 15 bp, synthetic construct
  source 1..15: mol_type = other DNA
tggtatttcatagat

SEQ ID NO: 13006 - DNA, 15 bp, synthetic construct
  source 1..15: mol_type = other DNA
tatcacccactgttc

SEQ ID NO: 13007 - DNA, 15 bp, synthetic construct
  source 1..15: mol_type = other DNA
tctgaaagctggtat

SEQ ID NO: 13008 - DNA, 15 bp, synthetic construct
  source 1..15: mol_type = other DNA
tagtgcttattgatt

SEQ ID NO: 13009 - DNA, 15 bp, synthetic construct
  source 1..15: mol_type = other DNA
tttgttgttgtcacg

SEQ ID NO: 13010 - DNA, 15 bp, synthetic construct
  source 1..15: mol_type = other DNA
agtgaggcatatgat

SEQ ID NO: 13011 - DNA, 15 bp, synthetic construct
  source 1..15: mol_type = other DNA
ttttctacctgccag

SEQ ID NO: 13012 - DNA, 15 bp, synthetic construct
  source 1..15: mol_type = other DNA
atcttttcatattga

SEQ ID NO: 13013 - DNA, 15 bp, synthetic construct
  source 1..15: mol_type = other DNA
ttttctacctgccag

SEQ ID NO: 13014 - DNA, 15 bp, synthetic construct
  source 1..15: mol_type = other DNA
atcttttcatattga

SEQ ID NO: 13015 - DNA, 15 bp, synthetic construct
  source 1..15: mol_type = other DNA
tgtagcccttgtgga

SEQ ID NO: 13016 - DNA, 15 bp, synthetic construct
  source 1..15: mol_type = other DNA
ggatcaactcagtaa

SEQ ID NO: 13017 - DNA, 15 bp, synthetic construct
  source 1..15: mol_type = other DNA
ttgatccgttgggat

SEQ ID NO: 13018 - DNA, 15 bp, synthetic construct
  source 1..15: mol_type = other DNA
tgcaacgaagaaaaa

SEQ ID NO: 13019 - DNA, 15 bp, synthetic construct
  source 1..15: mol_type = other DNA
tatttaggaaatctt

SEQ ID NO: 13020 - DNA, 15 bp, synthetic construct
  source 1..15: mol_type = other DNA
ttctacatgccttaa

SEQ ID NO: 13021 - DNA, 15 bp, synthetic construct
  source 1..15: mol_type = other DNA
atgccttgtatgggt

SEQ ID NO: 13022 - DNA, 15 bp, synthetic construct
  source 1..15: mol_type = other DNA
caatcttgatagtat

SEQ ID NO: 13023 - DNA, 15 bp, synthetic construct
  source 1..15: mol_type = other DNA
gtaatttggcttttt

SEQ ID NO: 13024 - DNA, 15 bp, synthetic construct
  source 1..15: mol_type = other DNA
tttggattaataaca

SEQ ID NO: 13025 - DNA, 15 bp, synthetic construct
  source 1..15: mol_type = other DNA
aaacttaacaggtta

SEQ ID NO: 13026 - DNA, 15 bp, synthetic construct
  source 1..15: mol_type = other DNA
gctgacgaacttctc

SEQ ID NO: 13027 - DNA, 15 bp, synthetic construct
  source 1..15: mol_type = other DNA
tcagatcgtttggtg

SEQ ID NO: 13028 - DNA, 15 bp, synthetic construct
  source 1..15: mol_type = other DNA
gcaggtattcaaaaa

SEQ ID NO: 13029 - DNA, 15 bp, synthetic construct
  source 1..15: mol_type = other DNA
aatgccctattggag

SEQ ID NO: 13030 - DNA, 15 bp, synthetic construct
  source 1..15: mol_type = other DNA
aatcatttgttgatc

SEQ ID NO: 13031 - DNA, 15 bp, synthetic construct
  source 1..15: mol_type = other DNA
ggtggcacattttta

SEQ ID NO: 13032 - DNA, 15 bp, synthetic construct
  source 1..15: mol_type = other DNA
attaagaattaaaca

SEQ ID NO: 13033 - DNA, 15 bp, synthetic construct
  source 1..15: mol_type = other DNA
gctactcaatctttg

SEQ ID NO: 13034 - DNA, 15 bp, synthetic construct
  source 1..15: mol_type = other DNA
tggatatagccttct

SEQ ID NO: 13035 - DNA, 15 bp, synthetic construct
  source 1..15: mol_type = other DNA
taacttgggataatc

SEQ ID NO: 13036 - DNA, 15 bp, synthetic construct
  source 1..15: mol_type = other DNA
tgatttctctgtact

SEQ ID NO: 13037 - DNA, 15 bp, synthetic construct
  source 1..15: mol_type = other DNA
actttgagactagca

SEQ ID NO: 13038 - DNA, 15 bp, synthetic construct
  source 1..15: mol_type = other DNA
ttcatatattgtact

SEQ ID NO: 13039 - DNA, 15 bp, synthetic construct
  source 1..15: mol_type = other DNA
agtaacaaggatgta

SEQ ID NO: 13040 - DNA, 15 bp, synthetic construct
  source 1..15: mol_type = other DNA
gtgttgtttccatgc

SEQ ID NO: 13041 - DNA, 15 bp, synthetic construct
  source 1..15: mol_type = other DNA
gggattccaagcaag

SEQ ID NO: 13042 - DNA, 15 bp, synthetic construct
  source 1..15: mol_type = other DNA
ccctgtctaaaagta

SEQ ID NO: 13043 - DNA, 15 bp, synthetic construct
  source 1..15: mol_type = other DNA
cttttgaagaaatcc

SEQ ID NO: 13044 - DNA, 15 bp, synthetic construct
  source 1..15: mol_type = other DNA
ggatggaacattaca

SEQ ID NO: 13045 - DNA, 15 bp, synthetic construct
  source 1..15: mol_type = other DNA
catattttcctcttt

SEQ ID NO: 13046 - DNA, 15 bp, synthetic construct
  source 1..15: mol_type = other DNA
tggaagtcgttctac

SEQ ID NO: 13047 - DNA, 15 bp, synthetic construct
  source 1..15: mol_type = other DNA
gtacatgattgggag

SEQ ID NO: 13048 - DNA, 15 bp, synthetic construct
  source 1..15: mol_type = other DNA
tcccttactgtccat

SEQ ID NO: 13049 - DNA, 15 bp, synthetic construct
  source 1..15: mol_type = other DNA
caccatattactgct

SEQ ID NO: 13050 - DNA, 15 bp, synthetic construct
  source 1..15: mol_type = other DNA
cagggttgcaattaa

SEQ ID NO: 13051 - DNA, 15 bp, synthetic construct
  source 1..15: mol_type = other DNA
gctgtcaaggtagat

SEQ ID NO: 13052 - DNA, 15 bp, synthetic construct
  source 1..15: mol_type = other DNA
gacttttcctgcttt

SEQ ID NO: 13053 - DNA, 15 bp, synthetic construct
  source 1..15: mol_type = other DNA
actaaactttcatgg

SEQ ID NO: 13054 - DNA, 15 bp, synthetic construct
  source 1..15: mol_type = other DNA
cctcagtaacaaatg

SEQ ID NO: 13055 - DNA, 15 bp, synthetic construct
  source 1..15: mol_type = other DNA
tcagctcatttacat

SEQ ID NO: 13056 - DNA, 15 bp, synthetic construct
  source 1..15: mol_type = other DNA
acctccttataatgt

SEQ ID NO: 13057 - DNA, 15 bp, synthetic construct
  source 1..15: mol_type = other DNA
taggaatttaacaaa

SEQ ID NO: 13058 - DNA, 15 bp, synthetic construct
  source 1..15: mol_type = other DNA
cagttcgtaaaagtc

SEQ ID NO: 13059 - DNA, 15 bp, synthetic construct
  source 1..15: mol_type = other DNA
tttcaagaagctgaa

SEQ ID NO: 13060 - DNA, 15 bp, synthetic construct
  source 1..15: mol_type = other DNA
agccacattaaatta

SEQ ID NO: 13061 - DNA, 15 bp, synthetic construct
  source 1..15: mol_type = other DNA
tttgaaaagttgaca

SEQ ID NO: 13062 - DNA, 15 bp, synthetic construct
  source 1..15: mol_type = other DNA
atcatcaccaggctt

SEQ ID NO: 13063 - DNA, 15 bp, synthetic construct
  source 1..15: mol_type = other DNA
atttaaagctcgttg

SEQ ID NO: 13064 - DNA, 15 bp, synthetic construct
  source 1..15: mol_type = other DNA
gaggaaagttatcaa

SEQ ID NO: 13065 - DNA, 15 bp, synthetic construct
  source 1..15: mol_type = other DNA
tacaaggattgcagt

SEQ ID NO: 13066 - DNA, 15 bp, synthetic construct
  source 1..15: mol_type = other DNA
gcacagctctcgata

SEQ ID NO: 13067 - DNA, 15 bp, synthetic construct
  source 1..15: mol_type = other DNA
ccctggcaagtagta

SEQ ID NO: 13068 - DNA, 15 bp, synthetic construct
  source 1..15: mol_type = other DNA
gcaaagattacatcc

SEQ ID NO: 13069 - DNA, 15 bp, synthetic construct
  source 1..15: mol_type = other DNA
tggatcacttttcgg

SEQ ID NO: 13070 - DNA, 15 bp, synthetic construct
  source 1..15: mol_type = other DNA
tttttaattggcaaa

SEQ ID NO: 13071 - DNA, 15 bp, synthetic construct
  source 1..15: mol_type = other DNA
tgtgtccatggcaac

SEQ ID NO: 13072 - DNA, 15 bp, synthetic construct
  source 1..15: mol_type = other DNA
gccagtgatctggag

SEQ ID NO: 13073 - DNA, 15 bp, synthetic construct
  source 1..15: mol_type = other DNA
aaatatgtgagaggg

SEQ ID NO: 13074 - DNA, 15 bp, synthetic construct
  source 1..15: mol_type = other DNA
acttatgggatattt

SEQ ID NO: 13075 - DNA, 15 bp, synthetic construct
  source 1..15: mol_type = other DNA
gtgaaaagccagata

SEQ ID NO: 13076 - DNA, 15 bp, synthetic construct
  source 1..15: mol_type = other DNA
ataatcaattaatgt

SEQ ID NO: 13077 - DNA, 15 bp, synthetic construct
  source 1..15: mol_type = other DNA
aacttgatctttggg

SEQ ID NO: 13078 - DNA, 15 bp, synthetic construct
  source 1..15: mol_type = other DNA
ccactttctctgaat

SEQ ID NO: 13079 - DNA, 15 bp, synthetic construct
  source 1..15: mol_type = other DNA
tgaatacctgcagaa

SEQ ID NO: 13080 - DNA, 15 bp, synthetic construct
  source 1..15: mol_type = other DNA
gcacttcacaatatg

SEQ ID NO: 13081 - DNA, 15 bp, synthetic construct
  source 1..15: mol_type = other DNA
cattttaagcaggta

SEQ ID NO: 13082 - DNA, 15 bp, synthetic construct
  source 1..15: mol_type = other DNA
ttgaagctgatcaag

SEQ ID NO: 13083 - DNA, 15 bp, synthetic construct
  source 1..15: mol_type = other DNA
ttaactactcatgct

SEQ ID NO: 13084 - DNA, 15 bp, synthetic construct
  source 1..15: mol_type = other DNA
tctaataagtcatca

SEQ ID NO: 13085 - DNA, 15 bp, synthetic construct
  source 1..15: mol_type = other DNA
ttaactactcatgct

SEQ ID NO: 13086 - DNA, 15 bp, synthetic construct
  source 1..15: mol_type = other DNA
tctaataagtcatca

SEQ ID NO: 13087 - DNA, 15 bp, synthetic construct
  source 1..15: mol_type = other DNA
tcccaagattttatt

SEQ ID NO: 13088 - DNA, 15 bp, synthetic construct
  source 1..15: mol_type = other DNA
gcagacagttgaaac

SEQ ID NO: 13089 - DNA, 15 bp, synthetic construct
  source 1..15: mol_type = other DNA
ttgcaattcaatcat

SEQ ID NO: 13090 - DNA, 15 bp, synthetic construct
  source 1..15: mol_type = other DNA
aaattgactaaatta

SEQ ID NO: 13091 - DNA, 15 bp, synthetic construct
  source 1..15: mol_type = other DNA
taacagtatagagtt

SEQ ID NO: 13092 - DNA, 15 bp, synthetic construct
  source 1..15: mol_type = other DNA
agcttctacacgtaa

SEQ ID NO: 13093 - DNA, 15 bp, synthetic construct
  source 1..15: mol_type = other DNA
taagatggagagatc

SEQ ID NO: 13094 - DNA, 15 bp, synthetic construct
  source 1..15: mol_type = other DNA
agaacttgtatcaat

SEQ ID NO: 13095 - DNA, 15 bp, synthetic construct
  source 1..15: mol_type = other DNA
gaataagttagagca

SEQ ID NO: 13096 - DNA, 15 bp, synthetic construct
  source 1..15: mol_type = other DNA
tacagtcaaaaacac

SEQ ID NO: 13097 - DNA, 15 bp, synthetic construct
  source 1..15: mol_type = other DNA
aacattttctccaat

SEQ ID NO: 13098 - DNA, 15 bp, synthetic construct
  source 1..15: mol_type = other DNA
cctgatattcataag

SEQ ID NO: 13099 - DNA, 15 bp, synthetic construct
  source 1..15: mol_type = other DNA
atggtggattctgaa

SEQ ID NO: 13100 - DNA, 15 bp, synthetic construct
  source 1..15: mol_type = other DNA
attctgattaaacaa

SEQ ID NO: 13101 - DNA, 15 bp, synthetic construct
  source 1..15: mol_type = other DNA
tgactttgtgttgtt

SEQ ID NO: 13102 - DNA, 15 bp, synthetic construct
  source 1..15: mol_type = other DNA
ccgttttcccagttc

SEQ ID NO: 13103 - DNA, 15 bp, synthetic construct
  source 1..15: mol_type = other DNA
ggaggaaatccttat

SEQ ID NO: 13104 - DNA, 15 bp, synthetic construct
  source 1..15: mol_type = other DNA
tccattttacatttc

SEQ ID NO: 13105 - DNA, 15 bp, synthetic construct
  source 1..15: mol_type = other DNA
agcaaaagaggcata

SEQ ID NO: 13106 - DNA, 15 bp, synthetic construct
  source 1..15: mol_type = other DNA
gtctggatttgcata

SEQ ID NO: 13107 - DNA, 15 bp, synthetic construct
  source 1..15: mol_type = other DNA
aagaatctgtactgt

SEQ ID NO: 13108 - DNA, 15 bp, synthetic construct
  source 1..15: mol_type = other DNA
gaaataaaaagagaa

SEQ ID NO: 13109 - DNA, 15 bp, synthetic construct
  source 1..15: mol_type = other DNA
tctgttggcagcata

SEQ ID NO: 13110 - DNA, 15 bp, synthetic construct
  source 1..15: mol_type = other DNA
tacgggcctgaaaag

SEQ ID NO: 13111 - DNA, 15 bp, synthetic construct
  source 1..15: mol_type = other DNA
aaaactgcctgataa

SEQ ID NO: 13112 - DNA, 15 bp, synthetic construct
  source 1..15: mol_type = other DNA
attgagaaaatatga

SEQ ID NO: 13113 - DNA, 15 bp, synthetic construct
  source 1..15: mol_type = other DNA
gttatgatgaaagta

SEQ ID NO: 13114 - DNA, 15 bp, synthetic construct
  source 1..15: mol_type = other DNA
attctaaattaacgc

SEQ ID NO: 13115 - DNA, 15 bp, synthetic construct
  source 1..15: mol_type = other DNA
tgccaattcatgtga

SEQ ID NO: 13116 - DNA, 15 bp, synthetic construct
  source 1..15: mol_type = other DNA
cgtaaactttgacat

SEQ ID NO: 13117 - DNA, 15 bp, synthetic construct
  source 1..15: mol_type = other DNA
ggtacaagcactgag

SEQ ID NO: 13118 - DNA, 15 bp, synthetic construct
  source 1..15: mol_type = other DNA
aaaagggatcaatct

SEQ ID NO: 13119 - DNA, 15 bp, synthetic construct
  source 1..15: mol_type = other DNA
aataaaagcagaact

SEQ ID NO: 13120 - DNA, 15 bp, synthetic construct
  source 1..15: mol_type = other DNA
gcatagctttgggat

SEQ ID NO: 13121 - DNA, 15 bp, synthetic construct
  source 1..15: mol_type = other DNA
aaagtagtgaaacaa

SEQ ID NO: 13122 - DNA, 15 bp, synthetic construct
  source 1..15: mol_type = other DNA
gtagaagtcttgaca

SEQ ID NO: 13123 - DNA, 15 bp, synthetic construct
  source 1..15: mol_type = other DNA
tttgtctccactgtt

SEQ ID NO: 13124 - DNA, 15 bp, synthetic construct
  source 1..15: mol_type = other DNA
cactgggcatagtca

SEQ ID NO: 13125 - DNA, 15 bp, synthetic construct
  source 1..15: mol_type = other DNA
tctgttctggatgat

SEQ ID NO: 13126 - DNA, 15 bp, synthetic construct
  source 1..15: mol_type = other DNA
ttattcacactacac

SEQ ID NO: 13127 - DNA, 15 bp, synthetic construct
  source 1..15: mol_type = other DNA
tgtatgctagcagac

SEQ ID NO: 13128 - DNA, 15 bp, synthetic construct
  source 1..15: mol_type = other DNA
accaagattttatca

SEQ ID NO: 13129 - DNA, 15 bp, synthetic construct
  source 1..15: mol_type = other DNA
gatgaagagacagat

SEQ ID NO: 13130 - DNA, 15 bp, synthetic construct
  source 1..15: mol_type = other DNA
acttctcacctcgat

SEQ ID NO: 13131 - DNA, 15 bp, synthetic construct
  source 1..15: mol_type = other DNA
tttgtctgtttgtat

SEQ ID NO: 13132 - DNA, 15 bp, synthetic construct
  source 1..15: mol_type = other DNA
gagttaatgaaaagt

SEQ ID NO: 13133 - DNA, 15 bp, synthetic construct
  source 1..15: mol_type = other DNA
gagtatgtgaaaact

SEQ ID NO: 13134 - DNA, 15 bp, synthetic construct
  source 1..15: mol_type = other DNA
tgaaatcatcagcag

SEQ ID NO: 13135 - DNA, 15 bp, synthetic construct
  source 1..15: mol_type = other DNA
gtgcttaagaagcca

SEQ ID NO: 13136 - DNA, 15 bp, synthetic construct
  source 1..15: mol_type = other DNA
ccacaacatatacct

SEQ ID NO: 13137 - DNA, 15 bp, synthetic construct
  source 1..15: mol_type = other DNA
tcaaagtcagatgtc

SEQ ID NO: 13138 - DNA, 15 bp, synthetic construct
  source 1..15: mol_type = other DNA
cttttggtctgtata

SEQ ID NO: 13139 - DNA, 15 bp, synthetic construct
  source 1..15: mol_type = other DNA
gtaatcagtactaat

SEQ ID NO: 13140 - DNA, 15 bp, synthetic construct
  source 1..15: mol_type = other DNA
gaatgaatattttct

SEQ ID NO: 13141 - DNA, 15 bp, synthetic construct
  source 1..15: mol_type = other DNA
atgatgattgcattt

SEQ ID NO: 13142 - DNA, 15 bp, synthetic construct
  source 1..15: mol_type = other DNA
gaacgatggaagtaa

SEQ ID NO: 13143 - DNA, 15 bp, synthetic construct
  source 1..15: mol_type = other DNA
ggaagacataaactt

SEQ ID NO: 13144 - DNA, 15 bp, synthetic construct
  source 1..15: mol_type = other DNA
gaagggtaggaaaaa

SEQ ID NO: 13145 - DNA, 15 bp, synthetic construct
  source 1..15: mol_type = other DNA
tgagaatggatcggg

SEQ ID NO: 13146 - DNA, 15 bp, synthetic construct
  source 1..15: mol_type = other DNA
gaatgattcttcaga

SEQ ID NO: 13147 - DNA, 15 bp, synthetic construct
  source 1..15: mol_type = other DNA
catatttggaaccag

SEQ ID NO: 13148 - DNA, 15 bp, synthetic construct
  source 1..15: mol_type = other DNA
aattaaaagtagacc

SEQ ID NO: 13149 - DNA, 15 bp, synthetic construct
  source 1..15: mol_type = other DNA
acaggtagaaattgg

SEQ ID NO: 13150 - DNA, 15 bp, synthetic construct
  source 1..15: mol_type = other DNA
aggagtaaagaaata

SEQ ID NO: 13151 - DNA, 15 bp, synthetic construct
  source 1..15: mol_type = other DNA
atttacagttgatga

SEQ ID NO: 13152 - DNA, 15 bp, synthetic construct
  source 1..15: mol_type = other DNA
gtttggaagaagaaa

SEQ ID NO: 13153 - DNA, 15 bp, synthetic construct
  source 1..15: mol_type = other DNA
atttatctgatgcca

SEQ ID NO: 13154 - DNA, 15 bp, synthetic construct
  source 1..15: mol_type = other DNA
acaatttctaacaca

SEQ ID NO: 13155 - DNA, 15 bp, synthetic construct
  source 1..15: mol_type = other DNA
gatcctcaaaccatc

SEQ ID NO: 13156 - DNA, 15 bp, synthetic construct
  source 1..15: mol_type = other DNA
gctctgggtaagaaa

SEQ ID NO: 13157 - DNA, 15 bp, synthetic construct
  source 1..15: mol_type = other DNA
ttgttgaactctcat

SEQ ID NO: 13158 - DNA, 15 bp, synthetic construct
  source 1..15: mol_type = other DNA
ccaaatcccagttcc

SEQ ID NO: 13159 - DNA, 15 bp, synthetic construct
  source 1..15: mol_type = other DNA
tatgtagtcacttta

SEQ ID NO: 13160 - DNA, 15 bp, synthetic construct
  source 1..15: mol_type = other DNA
gctaatagaagtgaa

SEQ ID NO: 13161 - DNA, 15 bp, synthetic construct
  source 1..15: mol_type = other DNA
atagagtgctgagtt

SEQ ID NO: 13162 - DNA, 15 bp, synthetic construct
  source 1..15: mol_type = other DNA
aagagagtgggcaac

SEQ ID NO: 13163 - DNA, 15 bp, synthetic construct
  source 1..15: mol_type = other DNA
acttaaagggcacta

SEQ ID NO: 13164 - DNA, 15 bp, synthetic construct
  source 1..15: mol_type = other DNA
ttctccaaaacaaat

SEQ ID NO: 13165 - DNA, 15 bp, synthetic construct
  source 1..15: mol_type = other DNA
actattttgagtggt

SEQ ID NO: 13166 - DNA, 15 bp, synthetic construct
  source 1..15: mol_type = other DNA
tggtaacagcaaggg

SEQ ID NO: 13167 - DNA, 15 bp, synthetic construct
  source 1..15: mol_type = other DNA
actctatactcttga

SEQ ID NO: 13168 - DNA, 15 bp, synthetic construct
  source 1..15: mol_type = other DNA
aatgacaaaataagg

SEQ ID NO: 13169 - DNA, 15 bp, synthetic construct
  source 1..15: mol_type = other DNA
acgtatagattgcct

SEQ ID NO: 13170 - DNA, 15 bp, synthetic construct
  source 1..15: mol_type = other DNA
tgaaaatcaataact

SEQ ID NO: 13171 - DNA, 15 bp, synthetic construct
  source 1..15: mol_type = other DNA
agaaaagtacaatca

SEQ ID NO: 13172 - DNA, 15 bp, synthetic construct
  source 1..15: mol_type = other DNA
cattaaaaacggcaa

SEQ ID NO: 13173 - DNA, 15 bp, synthetic construct
  source 1..15: mol_type = other DNA
aggaatgcctgtgca

SEQ ID NO: 13174 - DNA, 15 bp, synthetic construct
  source 1..15: mol_type = other DNA
atgtaaaaaggtcat

SEQ ID NO: 13175 - DNA, 15 bp, synthetic construct
  source 1..15: mol_type = other DNA
atatggtgctacacc

SEQ ID NO: 13176 - DNA, 15 bp, synthetic construct
  source 1..15: mol_type = other DNA
acaaaactcttgttt

SEQ ID NO: 13177 - DNA, 15 bp, synthetic construct
  source 1..15: mol_type = other DNA
gtttgcttgattctt

SEQ ID NO: 13178 - DNA, 15 bp, synthetic construct
  source 1..15: mol_type = other DNA
ttctccagcttttct

SEQ ID NO: 13179 - DNA, 15 bp, synthetic construct
  source 1..15: mol_type = other DNA
taaagctcttgtgga

SEQ ID NO: 13180 - DNA, 15 bp, synthetic construct
  source 1..15: mol_type = other DNA
ttttcatttttgtgg

SEQ ID NO: 13181 - DNA, 15 bp, synthetic construct
  source 1..15: mol_type = other DNA
acctttctgatagaa

SEQ ID NO: 13182 - DNA, 15 bp, synthetic construct
  source 1..15: mol_type = other DNA
ctttcaagttctgtt

SEQ ID NO: 13183 - DNA, 15 bp, synthetic construct
  source 1..15: mol_type = other DNA
tcttataggatgcta

SEQ ID NO: 13184 - DNA, 15 bp, synthetic construct
  source 1..15: mol_type = other DNA
aatgtaaatggatct

SEQ ID NO: 13185 - DNA, 15 bp, synthetic construct
  source 1..15: mol_type = other DNA
gcaagacgtcttact

SEQ ID NO: 13186 - DNA, 15 bp, synthetic construct
  source 1..15: mol_type = other DNA
ctgaaagtgattcgg

SEQ ID NO: 13187 - DNA, 15 bp, synthetic construct
  source 1..15: mol_type = other DNA
aaactagcagttgga

SEQ ID NO: 13188 - DNA, 15 bp, synthetic construct
  source 1..15: mol_type = other DNA
agatgaagtgcattt

SEQ ID NO: 13189 - DNA, 15 bp, synthetic construct
  source 1..15: mol_type = other DNA
ttttgttaaactgat

SEQ ID NO: 13190 - DNA, 15 bp, synthetic construct
  source 1..15: mol_type = other DNA
gggcatcaaaggttg

SEQ ID NO: 13191 - DNA, 15 bp, synthetic construct
  source 1..15: mol_type = other DNA
aaagaggtgtaagag

SEQ ID NO: 13192 - DNA, 15 bp, synthetic construct
  source 1..15: mol_type = other DNA
gtaattcctataagc

SEQ ID NO: 13193 - DNA, 15 bp, synthetic construct
  source 1..15: mol_type = other DNA
aataagtgcccaaat

SEQ ID NO: 13194 - DNA, 15 bp, synthetic construct
  source 1..15: mol_type = other DNA
aattcgttccaagac

SEQ ID NO: 13195 - DNA, 15 bp, synthetic construct
  source 1..15: mol_type = other DNA
gaaagccaatattca

SEQ ID NO: 13196 - DNA, 15 bp, synthetic construct
  source 1..15: mol_type = other DNA
ttacaaatagagaaa

SEQ ID NO: 13197 - DNA, 15 bp, synthetic construct
  source 1..15: mol_type = other DNA
attctaagtaaaggt

SEQ ID NO: 13198 - DNA, 15 bp, synthetic construct
  source 1..15: mol_type = other DNA
acagaattaagaagc

SEQ ID NO: 13199 - DNA, 15 bp, synthetic construct
  source 1..15: mol_type = other DNA
aagacagaaaaagga

SEQ ID NO: 13200 - DNA, 15 bp, synthetic construct
  source 1..15: mol_type = other DNA
ccaaaatacacttca

SEQ ID NO: 13201 - DNA, 15 bp, synthetic construct
  source 1..15: mol_type = other DNA
ctttttgcttttaat

SEQ ID NO: 13202 - DNA, 15 bp, synthetic construct
  source 1..15: mol_type = other DNA
cttatgttctctgtc

SEQ ID NO: 13203 - DNA, 15 bp, synthetic construct
  source 1..15: mol_type = other DNA
tgcagaagtcttaat

SEQ ID NO: 13204 - DNA, 15 bp, synthetic construct
  source 1..15: mol_type = other DNA
gatctttctctcctt

SEQ ID NO: 13205 - DNA, 15 bp, synthetic construct
  source 1..15: mol_type = other DNA
gagatctttttgata

SEQ ID NO: 13206 - DNA, 15 bp, synthetic construct
  source 1..15: mol_type = other DNA
gagattcaggagcag

SEQ ID NO: 13207 - DNA, 15 bp, synthetic construct
  source 1..15: mol_type = other DNA
gctgcatttattaca

SEQ ID NO: 13208 - DNA, 15 bp, synthetic construct
  source 1..15: mol_type = other DNA
aaatttcccccattt

SEQ ID NO: 13209 - DNA, 15 bp, synthetic construct
  source 1..15: mol_type = other DNA
tcccttcatcaagta

SEQ ID NO: 13210 - DNA, 15 bp, synthetic construct
  source 1..15: mol_type = other DNA
ctacagcaagcttga

SEQ ID NO: 13211 - DNA, 15 bp, synthetic construct
  source 1..15: mol_type = other DNA
tttaagtaccctttg

SEQ ID NO: 13212 - DNA, 15 bp, synthetic construct
  source 1..15: mol_type = other DNA
tgaagtgttaccatg

SEQ ID NO: 13213 - DNA, 15 bp, synthetic construct
  source 1..15: mol_type = other DNA
ctggtcactgaagat

SEQ ID NO: 13214 - DNA, 15 bp, synthetic construct
  source 1..15: mol_type = other DNA
tagcttgggaagaag

SEQ ID NO: 13215 - DNA, 15 bp, synthetic construct
  source 1..15: mol_type = other DNA
cgagtgtgcccattt

SEQ ID NO: 13216 - DNA, 15 bp, synthetic construct
  source 1..15: mol_type = other DNA
tcctaattggtatgt

SEQ ID NO: 13217 - DNA, 15 bp, synthetic construct
  source 1..15: mol_type = other DNA
aaggatgtttgtaaa

SEQ ID NO: 13218 - DNA, 15 bp, synthetic construct
  source 1..15: mol_type = other DNA
aattacttactttgg

SEQ ID NO: 13219 - DNA, 15 bp, synthetic construct
  source 1..15: mol_type = other DNA
gattcagaccaacca

SEQ ID NO: 13220 - DNA, 15 bp, synthetic construct
  source 1..15: mol_type = other DNA
gaaaagattccaagg

SEQ ID NO: 13221 - DNA, 15 bp, synthetic construct
  source 1..15: mol_type = other DNA
tgttgaaggtgtctt

SEQ ID NO: 13222 - DNA, 15 bp, synthetic construct
  source 1..15: mol_type = other DNA
tcttcttcctgttgt

SEQ ID NO: 13223 - DNA, 15 bp, synthetic construct
  source 1..15: mol_type = other DNA
tgatttagaagaaca

SEQ ID NO: 13224 - DNA, 15 bp, synthetic construct
  source 1..15: mol_type = other DNA
gttagaattttgact

SEQ ID NO: 13225 - DNA, 15 bp, synthetic construct
  source 1..15: mol_type = other DNA
atcaaatgaatgaca

SEQ ID NO: 13226 - DNA, 15 bp, synthetic construct
  source 1..15: mol_type = other DNA
ctcaatcaaatcctt

SEQ ID NO: 13227 - DNA, 15 bp, synthetic construct
  source 1..15: mol_type = other DNA
atctcaaggcaatat

SEQ ID NO: 13228 - DNA, 15 bp, synthetic construct
  source 1..15: mol_type = other DNA
ttctacattttctat

SEQ ID NO: 13229 - DNA, 15 bp, synthetic construct
  source 1..15: mol_type = other DNA
atgtgcattgtagtc

SEQ ID NO: 13230 - DNA, 15 bp, synthetic construct
  source 1..15: mol_type = other DNA
acagcttacctgttt

SEQ ID NO: 13231 - DNA, 15 bp, synthetic construct
  source 1..15: mol_type = other DNA
acttttccaacgagc

SEQ ID NO: 13232 - DNA, 15 bp, synthetic construct
  source 1..15: mol_type = other DNA
tcttttggaacataa

SEQ ID NO: 13233 - DNA, 15 bp, synthetic construct
  source 1..15: mol_type = other DNA
tgtttagtcccttga

SEQ ID NO: 13234 - DNA, 15 bp, synthetic construct
  source 1..15: mol_type = other DNA
aaatagacaacgaca

SEQ ID NO: 13235 - DNA, 15 bp, synthetic construct
  source 1..15: mol_type = other DNA
gctcattacaacata

SEQ ID NO: 13236 - DNA, 15 bp, synthetic construct
  source 1..15: mol_type = other DNA
caagaatgctataag

SEQ ID NO: 13237 - DNA, 15 bp, synthetic construct
  source 1..15: mol_type = other DNA
ttgaagtgtctctaa

SEQ ID NO: 13238 - DNA, 15 bp, synthetic construct
  source 1..15: mol_type = other DNA
gcctcgaacaaaatg

SEQ ID NO: 13239 - DNA, 15 bp, synthetic construct
  source 1..15: mol_type = other DNA
aggctgatcagttga

SEQ ID NO: 13240 - DNA, 15 bp, synthetic construct
  source 1..15: mol_type = other DNA
aggaatcaccatttt

SEQ ID NO: 13241 - DNA, 15 bp, synthetic construct
  source 1..15: mol_type = other DNA
aatgagtatctgctt

SEQ ID NO: 13242 - DNA, 15 bp, synthetic construct
  source 1..15: mol_type = other DNA
aagcaaattatacct

SEQ ID NO: 13243 - DNA, 15 bp, synthetic construct
  source 1..15: mol_type = other DNA
ttctcagtcccttat

SEQ ID NO: 13244 - DNA, 15 bp, synthetic construct
  source 1..15: mol_type = other DNA
atccaagacggaagc

SEQ ID NO: 13245 - DNA, 15 bp, synthetic construct
  source 1..15: mol_type = other DNA
actctcaacaaaaaa

SEQ ID NO: 13246 - DNA, 15 bp, synthetic construct
  source 1..15: mol_type = other DNA
aagtatcaacagaaa

SEQ ID NO: 13247 - DNA, 15 bp, synthetic construct
  source 1..15: mol_type = other DNA
ttatagctcactgta

SEQ ID NO: 13248 - DNA, 15 bp, synthetic construct
  source 1..15: mol_type = other DNA
tttaaatggcttctg

SEQ ID NO: 13249 - DNA, 15 bp, synthetic construct
  source 1..15: mol_type = other DNA
gtttaaagcacagta

SEQ ID NO: 13250 - DNA, 15 bp, synthetic construct
  source 1..15: mol_type = other DNA
tggtctagttcttga

SEQ ID NO: 13251 - DNA, 15 bp, synthetic construct
  source 1..15: mol_type = other DNA
tcacctgggtattct

SEQ ID NO: 13252 - DNA, 15 bp, synthetic construct
  source 1..15: mol_type = other DNA
agttcttgaagttcc

SEQ ID NO: 13253 - DNA, 15 bp, synthetic construct
  source 1..15: mol_type = other DNA
tttctccgggtgctg

SEQ ID NO: 13254 - DNA, 15 bp, synthetic construct
  source 1..15: mol_type = other DNA
atagcaaaaacaaaa

SEQ ID NO: 13255 - DNA, 15 bp, synthetic construct
  source 1..15: mol_type = other DNA
aggaaggtttaggga

SEQ ID NO: 13256 - DNA, 15 bp, synthetic construct
  source 1..15: mol_type = other DNA
aagttcttcaaacag

SEQ ID NO: 13257 - DNA, 15 bp, synthetic construct
  source 1..15: mol_type = other DNA
aatgtgcccgcaatg

SEQ ID NO: 13258 - DNA, 15 bp, synthetic construct
  source 1..15: mol_type = other DNA
gatgtcccttggaga

SEQ ID NO: 13259 - DNA, 15 bp, synthetic construct
  source 1..15: mol_type = other DNA
gttttgtaaacaagg

SEQ ID NO: 13260 - DNA, 15 bp, synthetic construct
  source 1..15: mol_type = other DNA
ggtgatccaagtttt

SEQ ID NO: 13261 - DNA, 15 bp, synthetic construct
  source 1..15: mol_type = other DNA
gcaataggatgtctg

SEQ ID NO: 13262 - DNA, 15 bp, synthetic construct
  source 1..15: mol_type = other DNA
aatattttaacatac

SEQ ID NO: 13263 - DNA, 15 bp, synthetic construct
  source 1..15: mol_type = other DNA
ttagttgtttactta

SEQ ID NO: 13264 - DNA, 15 bp, synthetic construct
  source 1..15: mol_type = other DNA
catcaaaaagtctgt

SEQ ID NO: 13265 - DNA, 15 bp, synthetic construct
  source 1..15: mol_type = other DNA
cttcgggctgggtac

SEQ ID NO: 13266 - DNA, 15 bp, synthetic construct
  source 1..15: mol_type = other DNA
attttgtgataggaa

SEQ ID NO: 13267 - DNA, 15 bp, synthetic construct
  source 1..15: mol_type = other DNA
gttaatattttagaa

SEQ ID NO: 13268 - DNA, 15 bp, synthetic construct
  source 1..15: mol_type = other DNA
tagcattttcaagta

SEQ ID NO: 13269 - DNA, 15 bp, synthetic construct
  source 1..15: mol_type = other DNA
gtacaatgggaattt

SEQ ID NO: 13270 - DNA, 15 bp, synthetic construct
  source 1..15: mol_type = other DNA
tatctacctggaaat

SEQ ID NO: 13271 - DNA, 15 bp, synthetic construct
  source 1..15: mol_type = other DNA
tcccacagataactg

SEQ ID NO: 13272 - DNA, 15 bp, synthetic construct
  source 1..15: mol_type = other DNA
tgagcgagcgatatt

SEQ ID NO: 13273 - DNA, 15 bp, synthetic construct
  source 1..15: mol_type = other DNA
ctagtttctttggtc

SEQ ID NO: 13274 - DNA, 15 bp, synthetic construct
  source 1..15: mol_type = other DNA
cttcaggctcactag

SEQ ID NO: 13275 - DNA, 15 bp, synthetic construct
  source 1..15: mol_type = other DNA
catttttggtctcta

SEQ ID NO: 13276 - DNA, 15 bp, synthetic construct
  source 1..15: mol_type = other DNA
ttcattagaccagat

SEQ ID NO: 13277 - DNA, 15 bp, synthetic construct
  source 1..15: mol_type = other DNA
agctggttccaaatt

SEQ ID NO: 13278 - DNA, 15 bp, synthetic construct
  source 1..15: mol_type = other DNA
cacagttaggaacct

SEQ ID NO: 13279 - DNA, 15 bp, synthetic construct
  source 1..15: mol_type = other DNA
aaatgttgaggaact

SEQ ID NO: 13280 - DNA, 15 bp, synthetic construct
  source 1..15: mol_type = other DNA
attggagatccttgt

SEQ ID NO: 13281 - DNA, 15 bp, synthetic construct
  source 1..15: mol_type = other DNA
agaaagtgcctcctc

SEQ ID NO: 13282 - DNA, 15 bp, synthetic construct
  source 1..15: mol_type = other DNA
acttataacaatgaa

SEQ ID NO: 13283 - DNA, 15 bp, synthetic construct
  source 1..15: mol_type = other DNA
gtactttccttcctt

SEQ ID NO: 13284 - DNA, 15 bp, synthetic construct
  source 1..15: mol_type = other DNA
taagggatcttctgg

SEQ ID NO: 13285 - DNA, 15 bp, synthetic construct
  source 1..15: mol_type = other DNA
tgtcctctcgcatgg

SEQ ID NO: 13286 - DNA, 15 bp, synthetic construct
  source 1..15: mol_type = other DNA
acccacttagtaaat

SEQ ID NO: 13287 - DNA, 15 bp, synthetic construct
  source 1..15: mol_type = other DNA
ggaagctgaattact

SEQ ID NO: 13288 - DNA, 15 bp, synthetic construct
  source 1..15: mol_type = other DNA
aattaccgtcaggga

SEQ ID NO: 13289 - DNA, 15 bp, synthetic construct
  source 1..15: mol_type = other DNA
gtgactttgatgctt

SEQ ID NO: 13290 - DNA, 15 bp, synthetic construct
  source 1..15: mol_type = other DNA
gattccaagatctaa

SEQ ID NO: 13291 - DNA, 15 bp, synthetic construct
  source 1..15: mol_type = other DNA
tctgacatttgcgac

SEQ ID NO: 13292 - DNA, 15 bp, synthetic construct
  source 1..15: mol_type = other DNA
aggccaagaatgtct

SEQ ID NO: 13293 - DNA, 15 bp, synthetic construct
  source 1..15: mol_type = other DNA
ataatctgtttccaa

SEQ ID NO: 13294 - DNA, 15 bp, synthetic construct
  source 1..15: mol_type = other DNA
tgtgaagatggcttt

SEQ ID NO: 13295 - DNA, 15 bp, synthetic construct
  source 1..15: mol_type = other DNA
tgactttgattagac

SEQ ID NO: 13296 - DNA, 15 bp, synthetic construct
  source 1..15: mol_type = other DNA
caccatcctcaaacc

SEQ ID NO: 13297 - DNA, 15 bp, synthetic construct
  source 1..15: mol_type = other DNA
cttcctgatttgctt

SEQ ID NO: 13298 - DNA, 15 bp, synthetic construct
  source 1..15: mol_type = other DNA
cacttgaataaaata

SEQ ID NO: 13299 - DNA, 15 bp, synthetic construct
  source 1..15: mol_type = other DNA
actggaagttatata

SEQ ID NO: 13300 - DNA, 15 bp, synthetic construct
  source 1..15: mol_type = other DNA
ccttcaaaattacta

SEQ ID NO: 13301 - DNA, 15 bp, synthetic construct
  source 1..15: mol_type = other DNA
cagacttttaggcat

SEQ ID NO: 13302 - DNA, 15 bp, synthetic construct
  source 1..15: mol_type = other DNA
tttcaagtacattta

SEQ ID NO: 13303 - DNA, 15 bp, synthetic construct
  source 1..15: mol_type = other DNA
ttcatttaaaaccct

SEQ ID NO: 13304 - DNA, 15 bp, synthetic construct
  source 1..15: mol_type = other DNA
ctcatctctggctct

SEQ ID NO: 13305 - DNA, 15 bp, synthetic construct
  source 1..15: mol_type = other DNA
agcaagtgactcgtc

SEQ ID NO: 13306 - DNA, 15 bp, synthetic construct
  source 1..15: mol_type = other DNA
ctgtgatgtcttgta

SEQ ID NO: 13307 - DNA, 15 bp, synthetic construct
  source 1..15: mol_type = other DNA
attctgtaatttgca

SEQ ID NO: 13308 - DNA, 15 bp, synthetic construct
  source 1..15: mol_type = other DNA
gttcagaatttaggc

SEQ ID NO: 13309 - DNA, 15 bp, synthetic construct
  source 1..15: mol_type = other DNA
gagccaaggtaagcc

SEQ ID NO: 13310 - DNA, 15 bp, synthetic construct
  source 1..15: mol_type = other DNA
aatttgagatcaaga

SEQ ID NO: 13311 - DNA, 15 bp, synthetic construct
  source 1..15: mol_type = other DNA
ttggtatacaccatt

SEQ ID NO: 13312 - DNA, 15 bp, synthetic construct
  source 1..15: mol_type = other DNA
agcaccgtaataggt

SEQ ID NO: 13313 - DNA, 15 bp, synthetic construct
  source 1..15: mol_type = other DNA
taaaatgctgaagtt

SEQ ID NO: 13314 - DNA, 15 bp, synthetic construct
  source 1..15: mol_type = other DNA
ttttcattctcaggt

SEQ ID NO: 13315 - DNA, 15 bp, synthetic construct
  source 1..15: mol_type = other DNA
cctgatgttcctttt

SEQ ID NO: 13316 - DNA, 15 bp, synthetic construct
  source 1..15: mol_type = other DNA
agcatgaggtatgtg

SEQ ID NO: 13317 - DNA, 15 bp, synthetic construct
  source 1..15: mol_type = other DNA
ggagctaatccaaca

SEQ ID NO: 13318 - DNA, 15 bp, synthetic construct
  source 1..15: mol_type = other DNA
cctcgagctcttgtc

SEQ ID NO: 13319 - DNA, 15 bp, synthetic construct
  source 1..15: mol_type = other DNA
tggtgaacctgcaat

SEQ ID NO: 13320 - DNA, 15 bp, synthetic construct
  source 1..15: mol_type = other DNA
ctgtggtacgtgttt

SEQ ID NO: 13321 - DNA, 15 bp, synthetic construct
  source 1..15: mol_type = other DNA
ttttctatttctaat

SEQ ID NO: 13322 - DNA, 15 bp, synthetic construct
  source 1..15: mol_type = other DNA
gtttatgagtttttc

SEQ ID NO: 13323 - DNA, 15 bp, synthetic construct
  source 1..15: mol_type = other DNA
accagagactcacct

SEQ ID NO: 13324 - DNA, 15 bp, synthetic construct
  source 1..15: mol_type = other DNA
gcttaacagagattt

SEQ ID NO: 13325 - DNA, 15 bp, synthetic construct
  source 1..15: mol_type = other DNA
aggagtcacacttgt

SEQ ID NO: 13326 - DNA, 15 bp, synthetic construct
  source 1..15: mol_type = other DNA
ggttatctgggaaca

SEQ ID NO: 13327 - DNA, 15 bp, synthetic construct
  source 1..15: mol_type = other DNA
caataggacctagct

SEQ ID NO: 13328 - DNA, 15 bp, synthetic construct
  source 1..15: mol_type = other DNA
tcggcagcgcctgaa

SEQ ID NO: 13329 - DNA, 15 bp, synthetic construct
  source 1..15: mol_type = other DNA
cacacgtactcggtc

SEQ ID NO: 13330 - DNA, 15 bp, synthetic construct
  source 1..15: mol_type = other DNA
gcggacaccgtttgc

SEQ ID NO: 13331 - DNA, 15 bp, synthetic construct
  source 1..15: mol_type = other DNA
tccacgcccgcaaca

SEQ ID NO: 13332 - DNA, 15 bp, synthetic construct
  source 1..15: mol_type = other DNA
atgccctgctttcgg

SEQ ID NO: 13333 - DNA, 15 bp, synthetic construct
  source 1..15: mol_type = other DNA
caaaagaaagaagct

SEQ ID NO: 13334 - DNA, 15 bp, synthetic construct
  source 1..15: mol_type = other DNA
cagactggccgagta

SEQ ID NO: 13335 - DNA, 15 bp, synthetic construct
  source 1..15: mol_type = other DNA
tcgagcgcgggcttg

SEQ ID NO: 13336 - DNA, 15 bp, synthetic construct
  source 1..15: mol_type = other DNA
cgcgcagagctccaa

SEQ ID NO: 13337 - DNA, 15 bp, synthetic construct
  source 1..15: mol_type = other DNA
ctcttgcagctcgtg

SEQ ID NO: 13338 - DNA, 15 bp, synthetic construct
  source 1..15: mol_type = other DNA
agttctgggataacc

SEQ ID NO: 13339 - DNA, 15 bp, synthetic construct
  source 1..15: mol_type = other DNA
gtgtactggaaatgc

SEQ ID NO: 13340 - DNA, 15 bp, synthetic construct
  source 1..15: mol_type = other DNA
gtgtactggaaatgc

SEQ ID NO: 13341 - DNA, 15 bp, synthetic construct
  source 1..15: mol_type = other DNA
tcatcagatattagg

SEQ ID NO: 13342 - DNA, 15 bp, synthetic construct
  source 1..15: mol_type = other DNA
gcagcaagatgaacc

SEQ ID NO: 13343 - DNA, 15 bp, synthetic construct
  source 1..15: mol_type = other DNA
catccacgtacacag

SEQ ID NO: 13344 - DNA, 15 bp, synthetic construct
  source 1..15: mol_type = other DNA
agggagccaaccatc

SEQ ID NO: 13345 - DNA, 15 bp, synthetic construct
  source 1..15: mol_type = other DNA
gctccctaggttagg

SEQ ID NO: 13346 - DNA, 15 bp, synthetic construct
  source 1..15: mol_type = other DNA
acctgaggtcttctc

SEQ ID NO: 13347 - DNA, 15 bp, synthetic construct
  source 1..15: mol_type = other DNA
tgttaagcttggtca

SEQ ID NO: 13348 - DNA, 15 bp, synthetic construct
  source 1..15: mol_type = other DNA
taccatactttgcac

SEQ ID NO: 13349 - DNA, 15 bp, synthetic construct
  source 1..15: mol_type = other DNA
tactttcccacctct

SEQ ID NO: 13350 - DNA, 15 bp, synthetic construct
  source 1..15: mol_type = other DNA
gtacaggataggctt

SEQ ID NO: 13351 - DNA, 15 bp, synthetic construct
  source 1..15: mol_type = other DNA
atcctttccttccct

SEQ ID NO: 13352 - DNA, 15 bp, synthetic construct
  source 1..15: mol_type = other DNA
gtgttcgtcacatgg

SEQ ID NO: 13353 - DNA, 15 bp, synthetic construct
  source 1..15: mol_type = other DNA
aggtgacatttacta

SEQ ID NO: 13354 - DNA, 15 bp, synthetic construct
  source 1..15: mol_type = other DNA
agaggttcccaacat

SEQ ID NO: 13355 - DNA, 15 bp, synthetic construct
  source 1..15: mol_type = other DNA
gtaacaagatgtttt

SEQ ID NO: 13356 - DNA, 15 bp, synthetic construct
  source 1..15: mol_type = other DNA
cactgaacgcaagag

SEQ ID NO: 13357 - DNA, 15 bp, synthetic construct
  source 1..15: mol_type = other DNA
tctgggagacattga

SEQ ID NO: 13358 - DNA, 15 bp, synthetic construct
  source 1..15: mol_type = other DNA
ggacttcatcattac

SEQ ID NO: 13359 - DNA, 15 bp, synthetic construct
  source 1..15: mol_type = other DNA
ttgggctccatatat

SEQ ID NO: 13360 - DNA, 15 bp, synthetic construct
  source 1..15: mol_type = other DNA
tgaaggtaattaata

SEQ ID NO: 13361 - DNA, 15 bp, synthetic construct
  source 1..15: mol_type = other DNA
ttcttcagagttacc

SEQ ID NO: 13362 - DNA, 15 bp, synthetic construct
  source 1..15: mol_type = other DNA
acaaaatggttcttt

SEQ ID NO: 13363 - DNA, 15 bp, synthetic construct
  source 1..15: mol_type = other DNA
aacatggtctgttgc

SEQ ID NO: 13364 - DNA, 15 bp, synthetic construct
  source 1..15: mol_type = other DNA
ttcctgcaaatctta

SEQ ID NO: 13365 - DNA, 15 bp, synthetic construct
  source 1..15: mol_type = other DNA
ttccagaaaaagagg

SEQ ID NO: 13366 - DNA, 15 bp, synthetic construct
  source 1..15: mol_type = other DNA
ggatacagtgactta

SEQ ID NO: 13367 - DNA, 15 bp, synthetic construct
  source 1..15: mol_type = other DNA
ctgaaaaggaagcac

SEQ ID NO: 13368 - DNA, 15 bp, synthetic construct
  source 1..15: mol_type = other DNA
ctcctgactcagtaa

SEQ ID NO: 13369 - DNA, 15 bp, synthetic construct
  source 1..15: mol_type = other DNA
tttcagtttgacctg

SEQ ID NO: 13370 - DNA, 15 bp, synthetic construct
  source 1..15: mol_type = other DNA
aggctcacaaatcta

SEQ ID NO: 13371 - DNA, 15 bp, synthetic construct
  source 1..15: mol_type = other DNA
ataatagacatcttt

SEQ ID NO: 13372 - DNA, 15 bp, synthetic construct
  source 1..15: mol_type = other DNA
ggtcatccgaaaaag

SEQ ID NO: 13373 - DNA, 15 bp, synthetic construct
  source 1..15: mol_type = other DNA
agtgctttcgtctaa

SEQ ID NO: 13374 - DNA, 15 bp, synthetic construct
  source 1..15: mol_type = other DNA
aattctgcccaagtc

SEQ ID NO: 13375 - DNA, 15 bp, synthetic construct
  source 1..15: mol_type = other DNA
gtccacacactgtac

SEQ ID NO: 13376 - DNA, 15 bp, synthetic construct
  source 1..15: mol_type = other DNA
catccttacctctgg

SEQ ID NO: 13377 - DNA, 15 bp, synthetic construct
  source 1..15: mol_type = other DNA
caggttatctcctcc

SEQ ID NO: 13378 - DNA, 15 bp, synthetic construct
  source 1..15: mol_type = other DNA
gcactagcacacata

SEQ ID NO: 13379 - DNA, 15 bp, synthetic construct
  source 1..15: mol_type = other DNA
ctctgtcatagctct

SEQ ID NO: 13380 - DNA, 15 bp, synthetic construct
  source 1..15: mol_type = other DNA
tggcccttacacctc

SEQ ID NO: 13381 - DNA, 15 bp, synthetic construct
  source 1..15: mol_type = other DNA
atcctgaggagaagg

SEQ ID NO: 13382 - DNA, 15 bp, synthetic construct
  source 1..15: mol_type = other DNA
taaggatcagtcatg

SEQ ID NO: 13383 - DNA, 15 bp, synthetic construct
  source 1..15: mol_type = other DNA
gtgatgatatgccat

SEQ ID NO: 13384 - DNA, 15 bp, synthetic construct
  source 1..15: mol_type = other DNA
gagagattgctcttt

SEQ ID NO: 13385 - DNA, 15 bp, synthetic construct
  source 1..15: mol_type = other DNA
gagcaagaccagagg

SEQ ID NO: 13386 - DNA, 15 bp, synthetic construct
  source 1..15: mol_type = other DNA
tttagttggtcttag

SEQ ID NO: 13387 - DNA, 15 bp, synthetic construct
  source 1..15: mol_type = other DNA
tggtttctctgacaa

SEQ ID NO: 13388 - DNA, 15 bp, synthetic construct
  source 1..15: mol_type = other DNA
agtggaatggtaacg

SEQ ID NO: 13389 - DNA, 15 bp, synthetic construct
  source 1..15: mol_type = other DNA
tgaggaccaaatcag

SEQ ID NO: 13390 - DNA, 15 bp, synthetic construct
  source 1..15: mol_type = other DNA
atttttctgttccaa

SEQ ID NO: 13391 - DNA, 15 bp, synthetic construct
  source 1..15: mol_type = other DNA
tgaggaccaaatcag

SEQ ID NO: 13392 - DNA, 15 bp, synthetic construct
  source 1..15: mol_type = other DNA
atttttctgttccaa

SEQ ID NO: 13393 - DNA, 15 bp, synthetic construct
  source 1..15: mol_type = other DNA
ttggagtctcaacag

SEQ ID NO: 13394 - DNA, 15 bp, synthetic construct
  source 1..15: mol_type = other DNA
cttgtgcactcagtc

SEQ ID NO: 13395 - DNA, 15 bp, synthetic construct
  source 1..15: mol_type = other DNA
caaagatgtgctgtg

SEQ ID NO: 13396 - DNA, 15 bp, synthetic construct
  source 1..15: mol_type = other DNA
aatcagccatgaagg

SEQ ID NO: 13397 - DNA, 15 bp, synthetic construct
  source 1..15: mol_type = other DNA
ttagcagaattcagc

SEQ ID NO: 13398 - DNA, 15 bp, synthetic construct
  source 1..15: mol_type = other DNA
ggtgaactctgtgct

SEQ ID NO: 13399 - DNA, 15 bp, synthetic construct
  source 1..15: mol_type = other DNA
aggaagctcaacaga

SEQ ID NO: 13400 - DNA, 15 bp, synthetic construct
  source 1..15: mol_type = other DNA
taaggcataaaaagg

SEQ ID NO: 13401 - DNA, 15 bp, synthetic construct
  source 1..15: mol_type = other DNA
aagaccttcaggtgc

SEQ ID NO: 13402 - DNA, 15 bp, synthetic construct
  source 1..15: mol_type = other DNA
cttcatactgctctc

SEQ ID NO: 13403 - DNA, 15 bp, synthetic construct
  source 1..15: mol_type = other DNA
ttggacaagatgaag

SEQ ID NO: 13404 - DNA, 15 bp, synthetic construct
  source 1..15: mol_type = other DNA
aaacctcccacaatc

SEQ ID NO: 13405 - DNA, 15 bp, synthetic construct
  source 1..15: mol_type = other DNA
gatcttactgatgca

SEQ ID NO: 13406 - DNA, 15 bp, synthetic construct
  source 1..15: mol_type = other DNA
cctcaagacgcttgt

SEQ ID NO: 13407 - DNA, 15 bp, synthetic construct
  source 1..15: mol_type = other DNA
aactggagactgtga

SEQ ID NO: 13408 - DNA, 15 bp, synthetic construct
  source 1..15: mol_type = other DNA
ctgagtgtgttccct

SEQ ID NO: 13409 - DNA, 15 bp, synthetic construct
  source 1..15: mol_type = other DNA
aatgccttacactct

SEQ ID NO: 13410 - DNA, 15 bp, synthetic construct
  source 1..15: mol_type = other DNA
tgactctgaggtcaa

SEQ ID NO: 13411 - DNA, 15 bp, synthetic construct
  source 1..15: mol_type = other DNA
acctcagagtcatag

SEQ ID NO: 13412 - DNA, 15 bp, synthetic construct
  source 1..15: mol_type = other DNA
tcagatgaacaaaat

SEQ ID NO: 13413 - DNA, 15 bp, synthetic construct
  source 1..15: mol_type = other DNA
cttctatctttcctt

SEQ ID NO: 13414 - DNA, 15 bp, synthetic construct
  source 1..15: mol_type = other DNA
atccacttgggactc

SEQ ID NO: 13415 - DNA, 15 bp, synthetic construct
  source 1..15: mol_type = other DNA
cgagaaattcttgat

SEQ ID NO: 13416 - DNA, 15 bp, synthetic construct
  source 1..15: mol_type = other DNA
actccctacaaaatg

SEQ ID NO: 13417 - DNA, 15 bp, synthetic construct
  source 1..15: mol_type = other DNA
ggtgctattgttcgt

SEQ ID NO: 13418 - DNA, 15 bp, synthetic construct
  source 1..15: mol_type = other DNA
ctcaggtcctcaata

SEQ ID NO: 13419 - DNA, 15 bp, synthetic construct
  source 1..15: mol_type = other DNA
atgcttccccacatt

SEQ ID NO: 13420 - DNA, 15 bp, synthetic construct
  source 1..15: mol_type = other DNA
cagaccaggtcccat

SEQ ID NO: 13421 - DNA, 15 bp, synthetic construct
  source 1..15: mol_type = other DNA
ccagtcagatgatat

SEQ ID NO: 13422 - DNA, 15 bp, synthetic construct
  source 1..15: mol_type = other DNA
ttcatggtaccctaa

SEQ ID NO: 13423 - DNA, 15 bp, synthetic construct
  source 1..15: mol_type = other DNA
ggcttctgttttcct

SEQ ID NO: 13424 - DNA, 15 bp, synthetic construct
  source 1..15: mol_type = other DNA
ggttcttgcgcatat

SEQ ID NO: 13425 - DNA, 15 bp, synthetic construct
  source 1..15: mol_type = other DNA
aggagttccttgtgc

SEQ ID NO: 13426 - DNA, 15 bp, synthetic construct
  source 1..15: mol_type = other DNA
ccgagaatgaccaac

SEQ ID NO: 13427 - DNA, 15 bp, synthetic construct
  source 1..15: mol_type = other DNA
tgttttctccttggc

SEQ ID NO: 13428 - DNA, 15 bp, synthetic construct
  source 1..15: mol_type = other DNA
gaactcaacccaatc

SEQ ID NO: 13429 - DNA, 15 bp, synthetic construct
  source 1..15: mol_type = other DNA
ctgctgactttaccc

SEQ ID NO: 13430 - DNA, 15 bp, synthetic construct
  source 1..15: mol_type = other DNA
tcttctattccccaa

SEQ ID NO: 13431 - DNA, 15 bp, synthetic construct
  source 1..15: mol_type = other DNA
aacctgtttctcatg

SEQ ID NO: 13432 - DNA, 15 bp, synthetic construct
  source 1..15: mol_type = other DNA
cccgtggatcttgcg

SEQ ID NO: 13433 - DNA, 15 bp, synthetic construct
  source 1..15: mol_type = other DNA
cttttctttcagtcg

SEQ ID NO: 13434 - DNA, 15 bp, synthetic construct
  source 1..15: mol_type = other DNA
gtagcagatgataag

SEQ ID NO: 13435 - DNA, 15 bp, synthetic construct
  source 1..15: mol_type = other DNA
tcaaccctcagtcgc

SEQ ID NO: 13436 - DNA, 15 bp, synthetic construct
  source 1..15: mol_type = other DNA
tggaaaatacttgcg

SEQ ID NO: 13437 - DNA, 15 bp, synthetic construct
  source 1..15: mol_type = other DNA
acggtggacgacttc

SEQ ID NO: 13438 - DNA, 15 bp, synthetic construct
  source 1..15: mol_type = other DNA
gtcaatggaccaatg

SEQ ID NO: 13439 - DNA, 15 bp, synthetic construct
  source 1..15: mol_type = other DNA
cttttccttttattg

SEQ ID NO: 13440 - DNA, 15 bp, synthetic construct
  source 1..15: mol_type = other DNA
cagctcgactatgac

SEQ ID NO: 13441 - DNA, 15 bp, synthetic construct
  source 1..15: mol_type = other DNA
gtagctgagagaaag

SEQ ID NO: 13442 - DNA, 15 bp, synthetic construct
  source 1..15: mol_type = other DNA
gggaaccaggtaaaa

SEQ ID NO: 13443 - DNA, 15 bp, synthetic construct
  source 1..15: mol_type = other DNA
ggttgtatcctttta

SEQ ID NO: 13444 - DNA, 15 bp, synthetic construct
  source 1..15: mol_type = other DNA
aagcgatacaccttc

SEQ ID NO: 13445 - DNA, 15 bp, synthetic construct
  source 1..15: mol_type = other DNA
actttgagcctcctg

SEQ ID NO: 13446 - DNA, 15 bp, synthetic construct
  source 1..15: mol_type = other DNA
agcctgagataggtt

SEQ ID NO: 13447 - DNA, 15 bp, synthetic construct
  source 1..15: mol_type = other DNA
gatgggtgacagacc

SEQ ID NO: 13448 - DNA, 15 bp, synthetic construct
  source 1..15: mol_type = other DNA
gacacagtggaggat

SEQ ID NO: 13449 - DNA, 15 bp, synthetic construct
  source 1..15: mol_type = other DNA
tcagagacaaaatcc

SEQ ID NO: 13450 - DNA, 15 bp, synthetic construct
  source 1..15: mol_type = other DNA
cctgcgatgatactg

SEQ ID NO: 13451 - DNA, 15 bp, synthetic construct
  source 1..15: mol_type = other DNA
aagcaggaacctcac

SEQ ID NO: 13452 - DNA, 15 bp, synthetic construct
  source 1..15: mol_type = other DNA
agaccgttcgcaatg

SEQ ID NO: 13453 - DNA, 15 bp, synthetic construct
  source 1..15: mol_type = other DNA
ttactgaggaggatg

SEQ ID NO: 13454 - DNA, 15 bp, synthetic construct
  source 1..15: mol_type = other DNA
tatctcccctggtta

SEQ ID NO: 13455 - DNA, 15 bp, synthetic construct
  source 1..15: mol_type = other DNA
gcagcccgtggtaac

SEQ ID NO: 13456 - DNA, 15 bp, synthetic construct
  source 1..15: mol_type = other DNA
ctcgagggtcctctg

SEQ ID NO: 13457 - DNA, 15 bp, synthetic construct
  source 1..15: mol_type = other DNA
tttaagttgcaaatt

SEQ ID NO: 13458 - DNA, 15 bp, synthetic construct
  source 1..15: mol_type = other DNA
ccaaaaagcagagac

SEQ ID NO: 13459 - DNA, 15 bp, synthetic construct
  source 1..15: mol_type = other DNA
ctgcctctcttcctt

SEQ ID NO: 13460 - DNA, 15 bp, synthetic construct
  source 1..15: mol_type = other DNA
ctgaagtgtgaagag

SEQ ID NO: 13461 - DNA, 15 bp, synthetic construct
  source 1..15: mol_type = other DNA
gatgaaaggaccgaa

SEQ ID NO: 13462 - DNA, 15 bp, synthetic construct
  source 1..15: mol_type = other DNA
cagcaccagctaccc

SEQ ID NO: 13463 - DNA, 15 bp, synthetic construct
  source 1..15: mol_type = other DNA
ctaggagctttagag

SEQ ID NO: 13464 - DNA, 15 bp, synthetic construct
  source 1..15: mol_type = other DNA
tttgctcccatagta

SEQ ID NO: 13465 - DNA, 15 bp, synthetic construct
  source 1..15: mol_type = other DNA
gtatttcccttcctt

SEQ ID NO: 13466 - DNA, 15 bp, synthetic construct
  source 1..15: mol_type = other DNA
agttgacgctgggaa

SEQ ID NO: 13467 - DNA, 15 bp, synthetic construct
  source 1..15: mol_type = other DNA
tgttgtgatcaatga

SEQ ID NO: 13468 - DNA, 15 bp, synthetic construct
  source 1..15: mol_type = other DNA
attacgttcagcaag

SEQ ID NO: 13469 - DNA, 15 bp, synthetic construct
  source 1..15: mol_type = other DNA
agattagccactcgg

SEQ ID NO: 13470 - DNA, 15 bp, synthetic construct
  source 1..15: mol_type = other DNA
tctctggagactcaa

SEQ ID NO: 13471 - DNA, 15 bp, synthetic construct
  source 1..15: mol_type = other DNA
cacctgaatccatat

SEQ ID NO: 13472 - DNA, 15 bp, synthetic construct
  source 1..15: mol_type = other DNA
ttgtggacatctgga

SEQ ID NO: 13473 - DNA, 15 bp, synthetic construct
  source 1..15: mol_type = other DNA
ctccacttgaggtca

SEQ ID NO: 13474 - DNA, 15 bp, synthetic construct
  source 1..15: mol_type = other DNA
gttcactattgctat

SEQ ID NO: 13475 - DNA, 15 bp, synthetic construct
  source 1..15: mol_type = other DNA
accccctgattgatc

SEQ ID NO: 13476 - DNA, 15 bp, synthetic construct
  source 1..15: mol_type = other DNA
attagcgtcagtcca

SEQ ID NO: 13477 - DNA, 15 bp, synthetic construct
  source 1..15: mol_type = other DNA
ccattttgtaagccc

SEQ ID NO: 13478 - DNA, 15 bp, synthetic construct
  source 1..15: mol_type = other DNA
attctgaatggatac

SEQ ID NO: 13479 - DNA, 15 bp, synthetic construct
  source 1..15: mol_type = other DNA
atggtgtctttttaa

SEQ ID NO: 13480 - DNA, 15 bp, synthetic construct
  source 1..15: mol_type = other DNA
ctcaggtaccggtag

SEQ ID NO: 13481 - DNA, 15 bp, synthetic construct
  source 1..15: mol_type = other DNA
ccattgccacagacc

SEQ ID NO: 13482 - DNA, 15 bp, synthetic construct
  source 1..15: mol_type = other DNA
accccggatataagc

SEQ ID NO: 13483 - DNA, 15 bp, synthetic construct
  source 1..15: mol_type = other DNA
ccatggtttacactg

SEQ ID NO: 13484 - DNA, 15 bp, synthetic construct
  source 1..15: mol_type = other DNA
tcccctctggacact

SEQ ID NO: 13485 - DNA, 15 bp, synthetic construct
  source 1..15: mol_type = other DNA
cattgagaccgaaac

SEQ ID NO: 13486 - DNA, 15 bp, synthetic construct
  source 1..15: mol_type = other DNA
ggcacagcttctcgt

SEQ ID NO: 13487 - DNA, 15 bp, synthetic construct
  source 1..15: mol_type = other DNA
tgttttccaacaacg

SEQ ID NO: 13488 - DNA, 15 bp, synthetic construct
  source 1..15: mol_type = other DNA
ctcttctggttgatc

SEQ ID NO: 13489 - DNA, 15 bp, synthetic construct
  source 1..15: mol_type = other DNA
tcaacgtgggctttg

SEQ ID NO: 13490 - DNA, 15 bp, synthetic construct
  source 1..15: mol_type = other DNA
tgcctaagtctgaag

SEQ ID NO: 13491 - DNA, 15 bp, synthetic construct
  source 1..15: mol_type = other DNA
atgattgcatcataa

SEQ ID NO: 13492 - DNA, 15 bp, synthetic construct
  source 1..15: mol_type = other DNA
tggtctcataggtat

SEQ ID NO: 13493 - DNA, 15 bp, synthetic construct
  source 1..15: mol_type = other DNA
tatgaggtggactac

SEQ ID NO: 13494 - DNA, 15 bp, synthetic construct
  source 1..15: mol_type = other DNA
aggaggtcttaggga

SEQ ID NO: 13495 - DNA, 15 bp, synthetic construct
  source 1..15: mol_type = other DNA
ttcgttcacgaatcc

SEQ ID NO: 13496 - DNA, 15 bp, synthetic construct
  source 1..15: mol_type = other DNA
tccttgtccatagtg

SEQ ID NO: 13497 - DNA, 15 bp, synthetic construct
  source 1..15: mol_type = other DNA
cagctccgattcctc

SEQ ID NO: 13498 - DNA, 15 bp, synthetic construct
  source 1..15: mol_type = other DNA
ccggtggagcactct

SEQ ID NO: 13499 - DNA, 15 bp, synthetic construct
  source 1..15: mol_type = other DNA
gccggagcgtcatct

SEQ ID NO: 13500 - DNA, 15 bp, synthetic construct
  source 1..15: mol_type = other DNA
ctaggctgggacact

SEQ ID NO: 13501 - DNA, 15 bp, synthetic construct
  source 1..15: mol_type = other DNA
tgtccccagcagtac

SEQ ID NO: 13502 - DNA, 15 bp, synthetic construct
  source 1..15: mol_type = other DNA
ggtttcagtgtccag

SEQ ID NO: 13503 - DNA, 15 bp, synthetic construct
  source 1..15: mol_type = other DNA
cgatggccgctttct

SEQ ID NO: 13504 - DNA, 15 bp, synthetic construct
  source 1..15: mol_type = other DNA
tcagcccctttcaaa

SEQ ID NO: 13505 - DNA, 15 bp, synthetic construct
  source 1..15: mol_type = other DNA
tgtctgatttggtgt

SEQ ID NO: 13506 - DNA, 15 bp, synthetic construct
  source 1..15: mol_type = other DNA
tgttccagacgtcat

SEQ ID NO: 13507 - DNA, 15 bp, synthetic construct
  source 1..15: mol_type = other DNA
ctgagaggcagagat

SEQ ID NO: 13508 - DNA, 15 bp, synthetic construct
  source 1..15: mol_type = other DNA
ttaggctgaacaacc

SEQ ID NO: 13509 - DNA, 15 bp, synthetic construct
  source 1..15: mol_type = other DNA
tctccagtcatgtta

SEQ ID NO: 13510 - DNA, 15 bp, synthetic construct
  source 1..15: mol_type = other DNA
ttgactgagccagta

SEQ ID NO: 13511 - DNA, 15 bp, synthetic construct
  source 1..15: mol_type = other DNA
atactcgaactccac

SEQ ID NO: 13512 - DNA, 15 bp, synthetic construct
  source 1..15: mol_type = other DNA
tcaagctatgaattt

SEQ ID NO: 13513 - DNA, 15 bp, synthetic construct
  source 1..15: mol_type = other DNA
attgagtctgaatcg

SEQ ID NO: 13514 - DNA, 15 bp, synthetic construct
  source 1..15: mol_type = other DNA
ccaccttgggattct

SEQ ID NO: 13515 - DNA, 15 bp, synthetic construct
  source 1..15: mol_type = other DNA
aaaggaacctaaaag

SEQ ID NO: 13516 - DNA, 15 bp, synthetic construct
  source 1..15: mol_type = other DNA
gtgttgtactcaaag

SEQ ID NO: 13517 - DNA, 15 bp, synthetic construct
  source 1..15: mol_type = other DNA
tctgtaggcaccctt

SEQ ID NO: 13518 - DNA, 15 bp, synthetic construct
  source 1..15: mol_type = other DNA
aattctacccgtact

SEQ ID NO: 13519 - DNA, 15 bp, synthetic construct
  source 1..15: mol_type = other DNA
ttgaaccatgccttc

SEQ ID NO: 13520 - DNA, 15 bp, synthetic construct
  source 1..15: mol_type = other DNA
tttaccatttcttgt

SEQ ID NO: 13521 - DNA, 15 bp, synthetic construct
  source 1..15: mol_type = other DNA
agagatgtcccagaa

SEQ ID NO: 13522 - DNA, 15 bp, synthetic construct
  source 1..15: mol_type = other DNA
aaaatcccactaatc

SEQ ID NO: 13523 - DNA, 15 bp, synthetic construct
  source 1..15: mol_type = other DNA
gcttaatttaccctt

SEQ ID NO: 13524 - DNA, 15 bp, synthetic construct
  source 1..15: mol_type = other DNA
gtatgccggtgctag

SEQ ID NO: 13525 - DNA, 15 bp, synthetic construct
  source 1..15: mol_type = other DNA
ggtagaacaatccag

SEQ ID NO: 13526 - DNA, 15 bp, synthetic construct
  source 1..15: mol_type = other DNA
cagtgcaaaataaca

SEQ ID NO: 13527 - DNA, 15 bp, synthetic construct
  source 1..15: mol_type = other DNA
gtgatttgtctttct

SEQ ID NO: 13528 - DNA, 15 bp, synthetic construct
  source 1..15: mol_type = other DNA
tttacttaccacact

SEQ ID NO: 13529 - DNA, 15 bp, synthetic construct
  source 1..15: mol_type = other DNA
atttttccttcagct

SEQ ID NO: 13530 - DNA, 15 bp, synthetic construct
  source 1..15: mol_type = other DNA
ctatccattggctct

SEQ ID NO: 13531 - DNA, 15 bp, synthetic construct
  source 1..15: mol_type = other DNA
catgcaactatgccc

SEQ ID NO: 13532 - DNA, 15 bp, synthetic construct
  source 1..15: mol_type = other DNA
cttttcggcaaaagt

SEQ ID NO: 13533 - DNA, 15 bp, synthetic construct
  source 1..15: mol_type = other DNA
tgcacctctttctcc

SEQ ID NO: 13534 - DNA, 15 bp, synthetic construct
  source 1..15: mol_type = other DNA
ctggatgtattcatt

SEQ ID NO: 13535 - DNA, 15 bp, synthetic construct
  source 1..15: mol_type = other DNA
ttccagaagcattgt

SEQ ID NO: 13536 - DNA, 15 bp, synthetic construct
  source 1..15: mol_type = other DNA
agaaactggacgttc

SEQ ID NO: 13537 - DNA, 15 bp, synthetic construct
  source 1..15: mol_type = other DNA
ccagaatcacagata

SEQ ID NO: 13538 - DNA, 15 bp, synthetic construct
  source 1..15: mol_type = other DNA
ctccagttactctac

SEQ ID NO: 13539 - DNA, 15 bp, synthetic construct
  source 1..15: mol_type = other DNA
aggccgtagttatgt

SEQ ID NO: 13540 - DNA, 15 bp, synthetic construct
  source 1..15: mol_type = other DNA
ctgtttcataggact

SEQ ID NO: 13541 - DNA, 15 bp, synthetic construct
  source 1..15: mol_type = other DNA
ggcattccatacaac

SEQ ID NO: 13542 - DNA, 15 bp, synthetic construct
  source 1..15: mol_type = other DNA
gtgaaatttcaaacg

SEQ ID NO: 13543 - DNA, 15 bp, synthetic construct
  source 1..15: mol_type = other DNA
tttctgcacctatca

SEQ ID NO: 13544 - DNA, 15 bp, synthetic construct
  source 1..15: mol_type = other DNA
gccatgtaatccaac

SEQ ID NO: 13545 - DNA, 15 bp, synthetic construct
  source 1..15: mol_type = other DNA
gaatcaagaagaact

SEQ ID NO: 13546 - DNA, 15 bp, synthetic construct
  source 1..15: mol_type = other DNA
ggcattgagacgtca

SEQ ID NO: 13547 - DNA, 15 bp, synthetic construct
  source 1..15: mol_type = other DNA
ttcagaccccagtga

SEQ ID NO: 13548 - DNA, 15 bp, synthetic construct
  source 1..15: mol_type = other DNA
caaagtagggtagtt

SEQ ID NO: 13549 - DNA, 15 bp, synthetic construct
  source 1..15: mol_type = other DNA
acacttactttaggc

SEQ ID NO: 13550 - DNA, 15 bp, synthetic construct
  source 1..15: mol_type = other DNA
ctcttaattttcctt

SEQ ID NO: 13551 - DNA, 15 bp, synthetic construct
  source 1..15: mol_type = other DNA
gaaacatgctgttat

SEQ ID NO: 13552 - DNA, 15 bp, synthetic construct
  source 1..15: mol_type = other DNA
aaattaagagtttac

SEQ ID NO: 13553 - DNA, 15 bp, synthetic construct
  source 1..15: mol_type = other DNA
tgtttttctttacct

SEQ ID NO: 13554 - DNA, 15 bp, synthetic construct
  source 1..15: mol_type = other DNA
gaagggatgagaaac

SEQ ID NO: 13555 - DNA, 15 bp, synthetic construct
  source 1..15: mol_type = other DNA
actcctcatgtgtct

SEQ ID NO: 13556 - DNA, 15 bp, synthetic construct
  source 1..15: mol_type = other DNA
ggttagctggtattc

SEQ ID NO: 13557 - DNA, 15 bp, synthetic construct
  source 1..15: mol_type = other DNA
tgtggttcctagtca

SEQ ID NO: 13558 - DNA, 15 bp, synthetic construct
  source 1..15: mol_type = other DNA
atgatctactaggat

SEQ ID NO: 13559 - DNA, 15 bp, synthetic construct
  source 1..15: mol_type = other DNA
tgctgttttgctaat

SEQ ID NO: 13560 - DNA, 15 bp, synthetic construct
  source 1..15: mol_type = other DNA
cataggaactaaaag

SEQ ID NO: 13561 - DNA, 15 bp, synthetic construct
  source 1..15: mol_type = other DNA
gctacacctgggtac

SEQ ID NO: 13562 - DNA, 15 bp, synthetic construct
  source 1..15: mol_type = other DNA
tctcctttatcattg

SEQ ID NO: 13563 - DNA, 15 bp, synthetic construct
  source 1..15: mol_type = other DNA
ctaggacgtagtggg

SEQ ID NO: 13564 - DNA, 15 bp, synthetic construct
  source 1..15: mol_type = other DNA
aaggagaattctagt

SEQ ID NO: 13565 - DNA, 15 bp, synthetic construct
  source 1..15: mol_type = other DNA
acaggtacgtaaaac

SEQ ID NO: 13566 - DNA, 15 bp, synthetic construct
  source 1..15: mol_type = other DNA
gtcgagagcgactcc

SEQ ID NO: 13567 - DNA, 15 bp, synthetic construct
  source 1..15: mol_type = other DNA
acattcagatgttgc

SEQ ID NO: 13568 - DNA, 15 bp, synthetic construct
  source 1..15: mol_type = other DNA
ggtttggatttgatg

SEQ ID NO: 13569 - DNA, 15 bp, synthetic construct
  source 1..15: mol_type = other DNA
ctgcattgcttttct

SEQ ID NO: 13570 - DNA, 15 bp, synthetic construct
  source 1..15: mol_type = other DNA
caatggctattaaga

SEQ ID NO: 13571 - DNA, 15 bp, synthetic construct
  source 1..15: mol_type = other DNA
tgagaaatgacacta

SEQ ID NO: 13572 - DNA, 15 bp, synthetic construct
  source 1..15: mol_type = other DNA
tcactatgggagtgg

SEQ ID NO: 13573 - DNA, 15 bp, synthetic construct
  source 1..15: mol_type = other DNA
aaatgtccagtgata

SEQ ID NO: 13574 - DNA, 15 bp, synthetic construct
  source 1..15: mol_type = other DNA
gctaatggcttctta

SEQ ID NO: 13575 - DNA, 15 bp, synthetic construct
  source 1..15: mol_type = other DNA
gtgccaataatgaag

SEQ ID NO: 13576 - DNA, 15 bp, synthetic construct
  source 1..15: mol_type = other DNA
agcagaggcactgta

SEQ ID NO: 13577 - DNA, 15 bp, synthetic construct
  source 1..15: mol_type = other DNA
agcagacaatctttt

SEQ ID NO: 13578 - DNA, 15 bp, synthetic construct
  source 1..15: mol_type = other DNA
agcaatgctacttaa

SEQ ID NO: 13579 - DNA, 15 bp, synthetic construct
  source 1..15: mol_type = other DNA
actttagtcatacag

SEQ ID NO: 13580 - DNA, 15 bp, synthetic construct
  source 1..15: mol_type = other DNA
aaagtactggtgatt

SEQ ID NO: 13581 - DNA, 15 bp, synthetic construct
  source 1..15: mol_type = other DNA
ttcagtctgaggtta

SEQ ID NO: 13582 - DNA, 15 bp, synthetic construct
  source 1..15: mol_type = other DNA
tgctgaaactgttac

SEQ ID NO: 13583 - DNA, 15 bp, synthetic construct
  source 1..15: mol_type = other DNA
tgagatcgttgtttc

SEQ ID NO: 13584 - DNA, 15 bp, synthetic construct
  source 1..15: mol_type = other DNA
actaccacggtttca

SEQ ID NO: 13585 - DNA, 15 bp, synthetic construct
  source 1..15: mol_type = other DNA
tttctaccaccactt

SEQ ID NO: 13586 - DNA, 15 bp, synthetic construct
  source 1..15: mol_type = other DNA
actgatggaatgacc

SEQ ID NO: 13587 - DNA, 15 bp, synthetic construct
  source 1..15: mol_type = other DNA
ttctcagcctggtgg

SEQ ID NO: 13588 - DNA, 15 bp, synthetic construct
  source 1..15: mol_type = other DNA
tgggttgtgtatcag

SEQ ID NO: 13589 - DNA, 15 bp, synthetic construct
  source 1..15: mol_type = other DNA
ccatactcattgtcc

SEQ ID NO: 13590 - DNA, 15 bp, synthetic construct
  source 1..15: mol_type = other DNA
aattggttggtggta

SEQ ID NO: 13591 - DNA, 15 bp, synthetic construct
  source 1..15: mol_type = other DNA
ctcctgacttctacc

SEQ ID NO: 13592 - DNA, 15 bp, synthetic construct
  source 1..15: mol_type = other DNA
tgaaaaatgtactca

SEQ ID NO: 13593 - DNA, 15 bp, synthetic construct
  source 1..15: mol_type = other DNA
gctcttcagtacgca

SEQ ID NO: 13594 - DNA, 15 bp, synthetic construct
  source 1..15: mol_type = other DNA
caaataggcaaaagc

SEQ ID NO: 13595 - DNA, 15 bp, synthetic construct
  source 1..15: mol_type = other DNA
gtgactctgaaggtg

SEQ ID NO: 13596 - DNA, 15 bp, synthetic construct
  source 1..15: mol_type = other DNA
ggaactctgaataca

SEQ ID NO: 13597 - DNA, 15 bp, synthetic construct
  source 1..15: mol_type = other DNA
acaaagaccatagga

SEQ ID NO: 13598 - DNA, 15 bp, synthetic construct
  source 1..15: mol_type = other DNA
cagttatcaaatacg

SEQ ID NO: 13599 - DNA, 15 bp, synthetic construct
  source 1..15: mol_type = other DNA
tagtttgattttgct

SEQ ID NO: 13600 - DNA, 15 bp, synthetic construct
  source 1..15: mol_type = other DNA
gtgtcccaaataggt

SEQ ID NO: 13601 - DNA, 15 bp, synthetic construct
  source 1..15: mol_type = other DNA
gggaaataaagtgat

SEQ ID NO: 13602 - DNA, 15 bp, synthetic construct
  source 1..15: mol_type = other DNA
ggttatgccattcgg

SEQ ID NO: 13603 - DNA, 15 bp, synthetic construct
  source 1..15: mol_type = other DNA
tatcaagtagtagtc

SEQ ID NO: 13604 - DNA, 15 bp, synthetic construct
  source 1..15: mol_type = other DNA
ggagatgccactggt

SEQ ID NO: 13605 - DNA, 15 bp, synthetic construct
  source 1..15: mol_type = other DNA
ctgtatcaaaaactg

SEQ ID NO: 13606 - DNA, 15 bp, synthetic construct
  source 1..15: mol_type = other DNA
gctaggaaggctctt

SEQ ID NO: 13607 - DNA, 15 bp, synthetic construct
  source 1..15: mol_type = other DNA
tgtggatgatggttc

SEQ ID NO: 13608 - DNA, 15 bp, synthetic construct
  source 1..15: mol_type = other DNA
ggccctgggatctag

SEQ ID NO: 13609 - DNA, 15 bp, synthetic construct
  source 1..15: mol_type = other DNA
agcaggtttaggaat

SEQ ID NO: 13610 - DNA, 15 bp, synthetic construct
  source 1..15: mol_type = other DNA
ttcgactagatttgc

SEQ ID NO: 13611 - DNA, 15 bp, synthetic construct
  source 1..15: mol_type = other DNA
caaactgggcaaggt

SEQ ID NO: 13612 - DNA, 15 bp, synthetic construct
  source 1..15: mol_type = other DNA
caaattcctttgaaa

SEQ ID NO: 13613 - DNA, 15 bp, synthetic construct
  source 1..15: mol_type = other DNA
gccactttatctttt

SEQ ID NO: 13614 - DNA, 15 bp, synthetic construct
  source 1..15: mol_type = other DNA
gacgatgatggttgc

SEQ ID NO: 13615 - DNA, 15 bp, synthetic construct
  source 1..15: mol_type = other DNA
cttttaatgctcgta

SEQ ID NO: 13616 - DNA, 15 bp, synthetic construct
  source 1..15: mol_type = other DNA
ttacggattctctgc

SEQ ID NO: 13617 - DNA, 15 bp, synthetic construct
  source 1..15: mol_type = other DNA
tagcgccacacattt

SEQ ID NO: 13618 - DNA, 15 bp, synthetic construct
  source 1..15: mol_type = other DNA
agacttggtgaagtg

SEQ ID NO: 13619 - DNA, 15 bp, synthetic construct
  source 1..15: mol_type = other DNA
agctacctctctagg

SEQ ID NO: 13620 - DNA, 15 bp, synthetic construct
  source 1..15: mol_type = other DNA
tctattcagttaatg

SEQ ID NO: 13621 - DNA, 15 bp, synthetic construct
  source 1..15: mol_type = other DNA
agcaaattccataca

SEQ ID NO: 13622 - DNA, 15 bp, synthetic construct
  source 1..15: mol_type = other DNA
ccagtgacccattag

SEQ ID NO: 13623 - DNA, 15 bp, synthetic construct
  source 1..15: mol_type = other DNA
cctagatgaacttgg

SEQ ID NO: 13624 - DNA, 15 bp, synthetic construct
  source 1..15: mol_type = other DNA
attcacttcaacacc

SEQ ID NO: 13625 - DNA, 15 bp, synthetic construct
  source 1..15: mol_type = other DNA
ccgctccgagtcgtc

SEQ ID NO: 13626 - DNA, 15 bp, synthetic construct
  source 1..15: mol_type = other DNA
ggttcgctcttgtcc

SEQ ID NO: 13627 - DNA, 15 bp, synthetic construct
  source 1..15: mol_type = other DNA
tctatgtcgtgtcaa

SEQ ID NO: 13628 - DNA, 15 bp, synthetic construct
  source 1..15: mol_type = other DNA
tgaaggtaggttttc

SEQ ID NO: 13629 - DNA, 15 bp, synthetic construct
  source 1..15: mol_type = other DNA
gtgacagaatcttcc

SEQ ID NO: 13630 - DNA, 15 bp, synthetic construct
  source 1..15: mol_type = other DNA
caagaatggccatgt

SEQ ID NO: 13631 - DNA, 15 bp, synthetic construct
  source 1..15: mol_type = other DNA
gatggtctgatgggg

SEQ ID NO: 13632 - DNA, 15 bp, synthetic construct
  source 1..15: mol_type = other DNA
tgtcaggtttcaatc

SEQ ID NO: 13633 - DNA, 15 bp, synthetic construct
  source 1..15: mol_type = other DNA
cctttccagaaaaaa

SEQ ID NO: 13634 - DNA, 15 bp, synthetic construct
  source 1..15: mol_type = other DNA
gcgcgaggcgcaata

SEQ ID NO: 13635 - DNA, 15 bp, synthetic construct
  source 1..15: mol_type = other DNA
cctcctcgatgtcct

SEQ ID NO: 13636 - DNA, 15 bp, synthetic construct
  source 1..15: mol_type = other DNA
cccgcagctgatgac

SEQ ID NO: 13637 - DNA, 15 bp, synthetic construct
  source 1..15: mol_type = other DNA
cgcacgaattccttc

SEQ ID NO: 13638 - DNA, 15 bp, synthetic construct
  source 1..15: mol_type = other DNA
agaagtgggaggaca

SEQ ID NO: 13639 - DNA, 15 bp, synthetic construct
  source 1..15: mol_type = other DNA
cgcacgaattccttc

SEQ ID NO: 13640 - DNA, 15 bp, synthetic construct
  source 1..15: mol_type = other DNA
agaagtgggaggaca

SEQ ID NO: 13641 - DNA, 15 bp, synthetic construct
  source 1..15: mol_type = other DNA
tgtctaggctctgtg

SEQ ID NO: 13642 - DNA, 15 bp, synthetic construct
  source 1..15: mol_type = other DNA
ccagctccacctata

SEQ ID NO: 13643 - DNA, 15 bp, synthetic construct
  source 1..15: mol_type = other DNA
gttgggacagtcacc

SEQ ID NO: 13644 - DNA, 15 bp, synthetic construct
  source 1..15: mol_type = other DNA
ccacgtagaataaag

SEQ ID NO: 13645 - DNA, 15 bp, synthetic construct
  source 1..15: mol_type = other DNA
aggcaattataagga

SEQ ID NO: 13646 - DNA, 15 bp, synthetic construct
  source 1..15: mol_type = other DNA
gaaatttatgatgct

SEQ ID NO: 13647 - DNA, 15 bp, synthetic construct
  source 1..15: mol_type = other DNA
atgcagctcgacatc

SEQ ID NO: 13648 - DNA, 15 bp, synthetic construct
  source 1..15: mol_type = other DNA
ttctttggtctttgc

SEQ ID NO: 13649 - DNA, 15 bp, synthetic construct
  source 1..15: mol_type = other DNA
taaaccaatgaagag

SEQ ID NO: 13650 - DNA, 15 bp, synthetic construct
  source 1..15: mol_type = other DNA
gcctaccccagattg

SEQ ID NO: 13651 - DNA, 15 bp, synthetic construct
  source 1..15: mol_type = other DNA
taaaccaatgaagag

SEQ ID NO: 13652 - DNA, 15 bp, synthetic construct
  source 1..15: mol_type = other DNA
gcctaccccagattg

SEQ ID NO: 13653 - DNA, 15 bp, synthetic construct
  source 1..15: mol_type = other DNA
agtgcccttaacatt

SEQ ID NO: 13654 - DNA, 15 bp, synthetic construct
  source 1..15: mol_type = other DNA
cttctgcatcagttc

SEQ ID NO: 13655 - DNA, 15 bp, synthetic construct
  source 1..15: mol_type = other DNA
ccatcctcaaagact

SEQ ID NO: 13656 - DNA, 15 bp, synthetic construct
  source 1..15: mol_type = other DNA
aggtttctttctaag

SEQ ID NO: 13657 - DNA, 15 bp, synthetic construct
  source 1..15: mol_type = other DNA
agatactcacttact

SEQ ID NO: 13658 - DNA, 15 bp, synthetic construct
  source 1..15: mol_type = other DNA
ggtctgacaaccaac

SEQ ID NO: 13659 - DNA, 15 bp, synthetic construct
  source 1..15: mol_type = other DNA
agacccacagaatac

SEQ ID NO: 13660 - DNA, 15 bp, synthetic construct
  source 1..15: mol_type = other DNA
aggtggagatctctt

SEQ ID NO: 13661 - DNA, 15 bp, synthetic construct
  source 1..15: mol_type = other DNA
actggaaaaggtttt

SEQ ID NO: 13662 - DNA, 15 bp, synthetic construct
  source 1..15: mol_type = other DNA
gagtgtgtattacag

SEQ ID NO: 13663 - DNA, 15 bp, synthetic construct
  source 1..15: mol_type = other DNA
tcacatccatgcagt

SEQ ID NO: 13664 - DNA, 15 bp, synthetic construct
  source 1..15: mol_type = other DNA
acctacttgtacaat

SEQ ID NO: 13665 - DNA, 15 bp, synthetic construct
  source 1..15: mol_type = other DNA
gtggttttctgaagc

SEQ ID NO: 13666 - DNA, 15 bp, synthetic construct
  source 1..15: mol_type = other DNA
agttgttcttcccta

SEQ ID NO: 13667 - DNA, 15 bp, synthetic construct
  source 1..15: mol_type = other DNA
caactggaagaagca

SEQ ID NO: 13668 - DNA, 15 bp, synthetic construct
  source 1..15: mol_type = other DNA
tgtctcctctatctg

SEQ ID NO: 13669 - DNA, 15 bp, synthetic construct
  source 1..15: mol_type = other DNA
aaaaggcggatgaat

SEQ ID NO: 13670 - DNA, 15 bp, synthetic construct
  source 1..15: mol_type = other DNA
agaggccatagctgt

SEQ ID NO: 13671 - DNA, 15 bp, synthetic construct
  source 1..15: mol_type = other DNA
agaaacctctccttc

SEQ ID NO: 13672 - DNA, 15 bp, synthetic construct
  source 1..15: mol_type = other DNA
aagccgatactggtc

SEQ ID NO: 13673 - DNA, 15 bp, synthetic construct
  source 1..15: mol_type = other DNA
ggtggaggctacctc

SEQ ID NO: 13674 - DNA, 15 bp, synthetic construct
  source 1..15: mol_type = other DNA
tctgccagagtccat

SEQ ID NO: 13675 - DNA, 15 bp, synthetic construct
  source 1..15: mol_type = other DNA
ccccagagcatcaca

SEQ ID NO: 13676 - DNA, 15 bp, synthetic construct
  source 1..15: mol_type = other DNA
aaaatagacctaaga

SEQ ID NO: 13677 - DNA, 15 bp, synthetic construct
  source 1..15: mol_type = other DNA
atttcctggaccttc

SEQ ID NO: 13678 - DNA, 15 bp, synthetic construct
  source 1..15: mol_type = other DNA
tatgtgtatgagtgt

SEQ ID NO: 13679 - DNA, 15 bp, synthetic construct
  source 1..15: mol_type = other DNA
tcactcccatatgct

SEQ ID NO: 13680 - DNA, 15 bp, synthetic construct
  source 1..15: mol_type = other DNA
caggttaccgagcca

SEQ ID NO: 13681 - DNA, 15 bp, synthetic construct
  source 1..15: mol_type = other DNA
attctacccaacctg

SEQ ID NO: 13682 - DNA, 15 bp, synthetic construct
  source 1..15: mol_type = other DNA
tcttgtaaagtgggt

SEQ ID NO: 13683 - DNA, 15 bp, synthetic construct
  source 1..15: mol_type = other DNA
tgaaaaacaagagca

SEQ ID NO: 13684 - DNA, 15 bp, synthetic construct
  source 1..15: mol_type = other DNA
tattcactcctgctt

SEQ ID NO: 13685 - DNA, 15 bp, synthetic construct
  source 1..15: mol_type = other DNA
tgtaggcacagccac

SEQ ID NO: 13686 - DNA, 15 bp, synthetic construct
  source 1..15: mol_type = other DNA
cccaacctgattccg

SEQ ID NO: 13687 - DNA, 15 bp, synthetic construct
  source 1..15: mol_type = other DNA
acccctccagctttg

SEQ ID NO: 13688 - DNA, 15 bp, synthetic construct
  source 1..15: mol_type = other DNA
tacaacctggaactg

SEQ ID NO: 13689 - DNA, 15 bp, synthetic construct
  source 1..15: mol_type = other DNA
ccacatgctcaaggc

SEQ ID NO: 13690 - DNA, 15 bp, synthetic construct
  source 1..15: mol_type = other DNA
cattcccctgctgtc

SEQ ID NO: 13691 - DNA, 15 bp, synthetic construct
  source 1..15: mol_type = other DNA
ccatcatccataaag

SEQ ID NO: 13692 - DNA, 15 bp, synthetic construct
  source 1..15: mol_type = other DNA
ctcttgcagctttag

SEQ ID NO: 13693 - DNA, 15 bp, synthetic construct
  source 1..15: mol_type = other DNA
taagtacaggtgagt

SEQ ID NO: 13694 - DNA, 15 bp, synthetic construct
  source 1..15: mol_type = other DNA
agagtggacatttct

SEQ ID NO: 13695 - DNA, 15 bp, synthetic construct
  source 1..15: mol_type = other DNA
cgtagggcgctctct

SEQ ID NO: 13696 - DNA, 15 bp, synthetic construct
  source 1..15: mol_type = other DNA
gcaacttcatcttcg

SEQ ID NO: 13697 - DNA, 15 bp, synthetic construct
  source 1..15: mol_type = other DNA
acctggttgaagcgg

SEQ ID NO: 13698 - DNA, 15 bp, synthetic construct
  source 1..15: mol_type = other DNA
cagatcactcattct

SEQ ID NO: 13699 - DNA, 15 bp, synthetic construct
  source 1..15: mol_type = other DNA
attttaattatctag

SEQ ID NO: 13700 - DNA, 15 bp, synthetic construct
  source 1..15: mol_type = other DNA
ggcctccagcttgcg

SEQ ID NO: 13701 - DNA, 15 bp, synthetic construct
  source 1..15: mol_type = other DNA
tcttccagtccttcc

SEQ ID NO: 13702 - DNA, 15 bp, synthetic construct
  source 1..15: mol_type = other DNA
tacccggaaattaaa

SEQ ID NO: 13703 - DNA, 15 bp, synthetic construct
  source 1..15: mol_type = other DNA
ggagctgtatttgta

SEQ ID NO: 13704 - DNA, 15 bp, synthetic construct
  source 1..15: mol_type = other DNA
acctgtttacccttc

SEQ ID NO: 13705 - DNA, 15 bp, synthetic construct
  source 1..15: mol_type = other DNA
ggctcctcattttgc

SEQ ID NO: 13706 - DNA, 15 bp, synthetic construct
  source 1..15: mol_type = other DNA
tcggagagtacttca

SEQ ID NO: 13707 - DNA, 15 bp, synthetic construct
  source 1..15: mol_type = other DNA
gacctgtagggattg

SEQ ID NO: 13708 - DNA, 15 bp, synthetic construct
  source 1..15: mol_type = other DNA
taccgagagctcttc

SEQ ID NO: 13709 - DNA, 15 bp, synthetic construct
  source 1..15: mol_type = other DNA
atggtggtgttgttg

SEQ ID NO: 13710 - DNA, 15 bp, synthetic construct
  source 1..15: mol_type = other DNA
aggaccctagacctc

SEQ ID NO: 13711 - DNA, 15 bp, synthetic construct
  source 1..15: mol_type = other DNA
ccctggagtggactg

SEQ ID NO: 13712 - DNA, 15 bp, synthetic construct
  source 1..15: mol_type = other DNA
gagtgggagaatgtg

SEQ ID NO: 13713 - DNA, 15 bp, synthetic construct
  source 1..15: mol_type = other DNA
aatcttgacaagcaa

SEQ ID NO: 13714 - DNA, 15 bp, synthetic construct
  source 1..15: mol_type = other DNA
atccttgggaagggt

SEQ ID NO: 13715 - DNA, 15 bp, synthetic construct
  source 1..15: mol_type = other DNA
atccttgggaagggt

SEQ ID NO: 13716 - DNA, 15 bp, synthetic construct
  source 1..15: mol_type = other DNA
aggagctcccctacc

SEQ ID NO: 13717 - DNA, 15 bp, synthetic construct
  source 1..15: mol_type = other DNA
gctctggctctttgt

SEQ ID NO: 13718 - DNA, 15 bp, synthetic construct
  source 1..15: mol_type = other DNA
gagcaaacttccctt

SEQ ID NO: 13719 - DNA, 15 bp, synthetic construct
  source 1..15: mol_type = other DNA
tataacctccatctc

SEQ ID NO: 13720 - DNA, 15 bp, synthetic construct
  source 1..15: mol_type = other DNA
ggccttgaaaataac

SEQ ID NO: 13721 - DNA, 15 bp, synthetic construct
  source 1..15: mol_type = other DNA
tagaagcttcagacg

SEQ ID NO: 13722 - DNA, 15 bp, synthetic construct
  source 1..15: mol_type = other DNA
agaaacgggacaata

SEQ ID NO: 13723 - DNA, 15 bp, synthetic construct
  source 1..15: mol_type = other DNA
cctttctctctcctc

SEQ ID NO: 13724 - DNA, 15 bp, synthetic construct
  source 1..15: mol_type = other DNA
gtgagggtcatcatt

SEQ ID NO: 13725 - DNA, 15 bp, synthetic construct
  source 1..15: mol_type = other DNA
aggattgagtctaga

SEQ ID NO: 13726 - DNA, 15 bp, synthetic construct
  source 1..15: mol_type = other DNA
aaaggtgatattact

SEQ ID NO: 13727 - DNA, 15 bp, synthetic construct
  source 1..15: mol_type = other DNA
tttaatcactggctg

SEQ ID NO: 13728 - DNA, 15 bp, synthetic construct
  source 1..15: mol_type = other DNA
agaatatttcttagg

SEQ ID NO: 13729 - DNA, 15 bp, synthetic construct
  source 1..15: mol_type = other DNA
tctgcttgtgtacct

SEQ ID NO: 13730 - DNA, 15 bp, synthetic construct
  source 1..15: mol_type = other DNA
tgaaggattcttctg

SEQ ID NO: 13731 - DNA, 15 bp, synthetic construct
  source 1..15: mol_type = other DNA
atatttccgttcgta

SEQ ID NO: 13732 - DNA, 15 bp, synthetic construct
  source 1..15: mol_type = other DNA
cttcactttcaggag

SEQ ID NO: 13733 - DNA, 15 bp, synthetic construct
  source 1..15: mol_type = other DNA
aactacgtctcagcc

SEQ ID NO: 13734 - DNA, 15 bp, synthetic construct
  source 1..15: mol_type = other DNA
ctgatttcctactgc

SEQ ID NO: 13735 - DNA, 15 bp, synthetic construct
  source 1..15: mol_type = other DNA
gtctattcatgtatc

SEQ ID NO: 13736 - DNA, 15 bp, synthetic construct
  source 1..15: mol_type = other DNA
gttccattgttctag

SEQ ID NO: 13737 - DNA, 15 bp, synthetic construct
  source 1..15: mol_type = other DNA
agtgtaacgtgcagc

SEQ ID NO: 13738 - DNA, 15 bp, synthetic construct
  source 1..15: mol_type = other DNA
tcctttacctgagtg

SEQ ID NO: 13739 - DNA, 15 bp, synthetic construct
  source 1..15: mol_type = other DNA
agaactacaacagca

SEQ ID NO: 13740 - DNA, 15 bp, synthetic construct
  source 1..15: mol_type = other DNA
ttgccagtcatttct

SEQ ID NO: 13741 - DNA, 15 bp, synthetic construct
  source 1..15: mol_type = other DNA
gtaacattctgaaat

SEQ ID NO: 13742 - DNA, 15 bp, synthetic construct
  source 1..15: mol_type = other DNA
tgagctcgcacattg

SEQ ID NO: 13743 - DNA, 15 bp, synthetic construct
  source 1..15: mol_type = other DNA
gctaagacattcctt

SEQ ID NO: 13744 - DNA, 15 bp, synthetic construct
  source 1..15: mol_type = other DNA
aagattaccacggat

SEQ ID NO: 13745 - DNA, 15 bp, synthetic construct
  source 1..15: mol_type = other DNA
cacaggaataaagga

SEQ ID NO: 13746 - DNA, 15 bp, synthetic construct
  source 1..15: mol_type = other DNA
tacataaaggtttgc

SEQ ID NO: 13747 - DNA, 15 bp, synthetic construct
  source 1..15: mol_type = other DNA
tactttctcccacag

SEQ ID NO: 13748 - DNA, 15 bp, synthetic construct
  source 1..15: mol_type = other DNA
gcactttctagagat

SEQ ID NO: 13749 - DNA, 15 bp, synthetic construct
  source 1..15: mol_type = other DNA
cctcgtttctccctt

SEQ ID NO: 13750 - DNA, 15 bp, synthetic construct
  source 1..15: mol_type = other DNA
gattgcttagtggtt

SEQ ID NO: 13751 - DNA, 15 bp, synthetic construct
  source 1..15: mol_type = other DNA
cctttagttgtttgg

SEQ ID NO: 13752 - DNA, 15 bp, synthetic construct
  source 1..15: mol_type = other DNA
atcgaatgatgcaaa

SEQ ID NO: 13753 - DNA, 15 bp, synthetic construct
  source 1..15: mol_type = other DNA
cctgcttattagtga

SEQ ID NO: 13754 - DNA, 15 bp, synthetic construct
  source 1..15: mol_type = other DNA
aactgagaaaaggta

SEQ ID NO: 13755 - DNA, 15 bp, synthetic construct
  source 1..15: mol_type = other DNA
ttaccaactcaacta

SEQ ID NO: 13756 - DNA, 15 bp, synthetic construct
  source 1..15: mol_type = other DNA
cccattgttgagacg

SEQ ID NO: 13757 - DNA, 15 bp, synthetic construct
  source 1..15: mol_type = other DNA
ccatgtcgtgaccat

SEQ ID NO: 13758 - DNA, 15 bp, synthetic construct
  source 1..15: mol_type = other DNA
tagtaagtgcacttt

SEQ ID NO: 13759 - DNA, 15 bp, synthetic construct
  source 1..15: mol_type = other DNA
ttccctgtaagagaa

SEQ ID NO: 13760 - DNA, 15 bp, synthetic construct
  source 1..15: mol_type = other DNA
aacttaggtgtgcaa

SEQ ID NO: 13761 - DNA, 15 bp, synthetic construct
  source 1..15: mol_type = other DNA
gtaagaatgctttgt

SEQ ID NO: 13762 - DNA, 15 bp, synthetic construct
  source 1..15: mol_type = other DNA
aagtctaccatcacc

SEQ ID NO: 13763 - DNA, 15 bp, synthetic construct
  source 1..15: mol_type = other DNA
taagcccgcacattt

SEQ ID NO: 13764 - DNA, 15 bp, synthetic construct
  source 1..15: mol_type = other DNA
atcagtccaaagaca

SEQ ID NO: 13765 - DNA, 15 bp, synthetic construct
  source 1..15: mol_type = other DNA
ctattaatgcacaca

SEQ ID NO: 13766 - DNA, 15 bp, synthetic construct
  source 1..15: mol_type = other DNA
actgctttaattcac

SEQ ID NO: 13767 - DNA, 15 bp, synthetic construct
  source 1..15: mol_type = other DNA
gataaatttgtcttt

SEQ ID NO: 13768 - DNA, 15 bp, synthetic construct
  source 1..15: mol_type = other DNA
ttctagtggccactg

SEQ ID NO: 13769 - DNA, 15 bp, synthetic construct
  source 1..15: mol_type = other DNA
aaccttagagaagta

SEQ ID NO: 13770 - DNA, 15 bp, synthetic construct
  source 1..15: mol_type = other DNA
cattacagaaggtag

SEQ ID NO: 13771 - DNA, 15 bp, synthetic construct
  source 1..15: mol_type = other DNA
gcttgtgagcaataa

SEQ ID NO: 13772 - DNA, 15 bp, synthetic construct
  source 1..15: mol_type = other DNA
attggtgaaattgat

SEQ ID NO: 13773 - DNA, 15 bp, synthetic construct
  source 1..15: mol_type = other DNA
atttttccttccatc

SEQ ID NO: 13774 - DNA, 15 bp, synthetic construct
  source 1..15: mol_type = other DNA
caattgctgggttgg

SEQ ID NO: 13775 - DNA, 15 bp, synthetic construct
  source 1..15: mol_type = other DNA
agtgtctggttaggt

SEQ ID NO: 13776 - DNA, 15 bp, synthetic construct
  source 1..15: mol_type = other DNA
aacagcaagcatttc

SEQ ID NO: 13777 - DNA, 15 bp, synthetic construct
  source 1..15: mol_type = other DNA
tcatgtgataagaat

SEQ ID NO: 13778 - DNA, 15 bp, synthetic construct
  source 1..15: mol_type = other DNA
tcctctgaaatcatc

SEQ ID NO: 13779 - DNA, 15 bp, synthetic construct
  source 1..15: mol_type = other DNA
atgtgaccattactg

SEQ ID NO: 13780 - DNA, 15 bp, synthetic construct
  source 1..15: mol_type = other DNA
cacactcgatatttt

SEQ ID NO: 13781 - DNA, 15 bp, synthetic construct
  source 1..15: mol_type = other DNA
tgaactgaaaaatta

SEQ ID NO: 13782 - DNA, 15 bp, synthetic construct
  source 1..15: mol_type = other DNA
aaaaccaactcctaa

SEQ ID NO: 13783 - DNA, 15 bp, synthetic construct
  source 1..15: mol_type = other DNA
ctgaataatatgcca

SEQ ID NO: 13784 - DNA, 15 bp, synthetic construct
  source 1..15: mol_type = other DNA
tttcagtccagggaa

SEQ ID NO: 13785 - DNA, 15 bp, synthetic construct
  source 1..15: mol_type = other DNA
catgtctgctctgaa

SEQ ID NO: 13786 - DNA, 15 bp, synthetic construct
  source 1..15: mol_type = other DNA
aaatggctactgctg

SEQ ID NO: 13787 - DNA, 15 bp, synthetic construct
  source 1..15: mol_type = other DNA
agttacaggtattct

SEQ ID NO: 13788 - DNA, 15 bp, synthetic construct
  source 1..15: mol_type = other DNA
taccttttcccacta

SEQ ID NO: 13789 - DNA, 15 bp, synthetic construct
  source 1..15: mol_type = other DNA
ggaatctgggtcata

SEQ ID NO: 13790 - DNA, 15 bp, synthetic construct
  source 1..15: mol_type = other DNA
tacaaagaagaatgt

SEQ ID NO: 13791 - DNA, 15 bp, synthetic construct
  source 1..15: mol_type = other DNA
caggagagagaatgg

SEQ ID NO: 13792 - DNA, 15 bp, synthetic construct
  source 1..15: mol_type = other DNA
gcactccaagcagta

SEQ ID NO: 13793 - DNA, 15 bp, synthetic construct
  source 1..15: mol_type = other DNA
atgctgcactcaggc

SEQ ID NO: 13794 - DNA, 15 bp, synthetic construct
  source 1..15: mol_type = other DNA
tgccttcttctctat

SEQ ID NO: 13795 - DNA, 15 bp, synthetic construct
  source 1..15: mol_type = other DNA
aagtaggtatttcct

SEQ ID NO: 13796 - DNA, 15 bp, synthetic construct
  source 1..15: mol_type = other DNA
agcccctcatcaagt

SEQ ID NO: 13797 - DNA, 15 bp, synthetic construct
  source 1..15: mol_type = other DNA
aagttcagcttcttc

SEQ ID NO: 13798 - DNA, 15 bp, synthetic construct
  source 1..15: mol_type = other DNA
catgggagggagtta

SEQ ID NO: 13799 - DNA, 15 bp, synthetic construct
  source 1..15: mol_type = other DNA
ccatgtatctgattg

SEQ ID NO: 13800 - DNA, 15 bp, synthetic construct
  source 1..15: mol_type = other DNA
gaccagatcgtactg

SEQ ID NO: 13801 - DNA, 15 bp, synthetic construct
  source 1..15: mol_type = other DNA
gcgcaacatgatgac

SEQ ID NO: 13802 - DNA, 15 bp, synthetic construct
  source 1..15: mol_type = other DNA
actgttctctctcaa

SEQ ID NO: 13803 - DNA, 15 bp, synthetic construct
  source 1..15: mol_type = other DNA
actctgactctgttc

SEQ ID NO: 13804 - DNA, 15 bp, synthetic construct
  source 1..15: mol_type = other DNA
gtatccttaaatagc

SEQ ID NO: 13805 - DNA, 15 bp, synthetic construct
  source 1..15: mol_type = other DNA
ctatggaggactgaa

SEQ ID NO: 13806 - DNA, 15 bp, synthetic construct
  source 1..15: mol_type = other DNA
tcctcaaagccattc

SEQ ID NO: 13807 - DNA, 15 bp, synthetic construct
  source 1..15: mol_type = other DNA
gataggaatggcttt

SEQ ID NO: 13808 - DNA, 15 bp, synthetic construct
  source 1..15: mol_type = other DNA
gccatactgctggac

SEQ ID NO: 13809 - DNA, 15 bp, synthetic construct
  source 1..15: mol_type = other DNA
agaagtcggagtagg

SEQ ID NO: 13810 - DNA, 15 bp, synthetic construct
  source 1..15: mol_type = other DNA
cttggacctttaccc

SEQ ID NO: 13811 - DNA, 15 bp, synthetic construct
  source 1..15: mol_type = other DNA
cttcaggcccaaacc

SEQ ID NO: 13812 - DNA, 15 bp, synthetic construct
  source 1..15: mol_type = other DNA
aagacaggtctccgt

SEQ ID NO: 13813 - DNA, 15 bp, synthetic construct
  source 1..15: mol_type = other DNA
tgtgaaaaatgcaag

SEQ ID NO: 13814 - DNA, 15 bp, synthetic construct
  source 1..15: mol_type = other DNA
tgctgttcttacagg

SEQ ID NO: 13815 - DNA, 15 bp, synthetic construct
  source 1..15: mol_type = other DNA
agtctccagggtcag

SEQ ID NO: 13816 - DNA, 15 bp, synthetic construct
  source 1..15: mol_type = other DNA
tctgagccagctatg

SEQ ID NO: 13817 - DNA, 15 bp, synthetic construct
  source 1..15: mol_type = other DNA
tcctgggtggtatcc

SEQ ID NO: 13818 - DNA, 15 bp, synthetic construct
  source 1..15: mol_type = other DNA
cttagataaaaggtt

SEQ ID NO: 13819 - DNA, 15 bp, synthetic construct
  source 1..15: mol_type = other DNA
ctgtaagacaataaa

SEQ ID NO: 13820 - DNA, 15 bp, synthetic construct
  source 1..15: mol_type = other DNA
agaaatgctccgcta

SEQ ID NO: 13821 - DNA, 15 bp, synthetic construct
  source 1..15: mol_type = other DNA
gagagcgatagagtg

SEQ ID NO: 13822 - DNA, 15 bp, synthetic construct
  source 1..15: mol_type = other DNA
accagggtgccaata

SEQ ID NO: 13823 - DNA, 15 bp, synthetic construct
  source 1..15: mol_type = other DNA
attgccatggcgttt

SEQ ID NO: 13824 - DNA, 15 bp, synthetic construct
  source 1..15: mol_type = other DNA
ggatggcaaagttgt

SEQ ID NO: 13825 - DNA, 15 bp, synthetic construct
  source 1..15: mol_type = other DNA
atcagtcgttgcagc

SEQ ID NO: 13826 - DNA, 15 bp, synthetic construct
  source 1..15: mol_type = other DNA
ggtggaggcgaagat

SEQ ID NO: 13827 - DNA, 15 bp, synthetic construct
  source 1..15: mol_type = other DNA
gagctcttcctgaca

SEQ ID NO: 13828 - DNA, 15 bp, synthetic construct
  source 1..15: mol_type = other DNA
gagttctgtgtatgt

SEQ ID NO: 13829 - DNA, 15 bp, synthetic construct
  source 1..15: mol_type = other DNA
ccatcacgtgggttc

SEQ ID NO: 13830 - DNA, 15 bp, synthetic construct
  source 1..15: mol_type = other DNA
tgttctccctctaaa

SEQ ID NO: 13831 - DNA, 15 bp, synthetic construct
  source 1..15: mol_type = other DNA
ttcgcacccttaacc

SEQ ID NO: 13832 - DNA, 15 bp, synthetic construct
  source 1..15: mol_type = other DNA
cagcacgtagttgta

SEQ ID NO: 13833 - DNA, 15 bp, synthetic construct
  source 1..15: mol_type = other DNA
aggtcttctggatcg

SEQ ID NO: 13834 - DNA, 15 bp, synthetic construct
  source 1..15: mol_type = other DNA
cgggcctcacaagcg

SEQ ID NO: 13835 - DNA, 15 bp, synthetic construct
  source 1..15: mol_type = other DNA
tggcgttaaacaggg

SEQ ID NO: 13836 - DNA, 15 bp, synthetic construct
  source 1..15: mol_type = other DNA
ctacatgattcctga

SEQ ID NO: 13837 - DNA, 15 bp, synthetic construct
  source 1..15: mol_type = other DNA
acattggctataaga

SEQ ID NO: 13838 - DNA, 15 bp, synthetic construct
  source 1..15: mol_type = other DNA
tgaaaaccatcaacg

SEQ ID NO: 13839 - DNA, 15 bp, synthetic construct
  source 1..15: mol_type = other DNA
ccccctttttcaagg

SEQ ID NO: 13840 - DNA, 15 bp, synthetic construct
  source 1..15: mol_type = other DNA
tgggctctctaccca

SEQ ID NO: 13841 - DNA, 15 bp, synthetic construct
  source 1..15: mol_type = other DNA
cccagcattgttcag

SEQ ID NO: 13842 - DNA, 15 bp, synthetic construct
  source 1..15: mol_type = other DNA
gcctgattcctggtc

SEQ ID NO: 13843 - DNA, 15 bp, synthetic construct
  source 1..15: mol_type = other DNA
tttgagggcttgatc

SEQ ID NO: 13844 - DNA, 15 bp, synthetic construct
  source 1..15: mol_type = other DNA
tttcttccggaaaac

SEQ ID NO: 13845 - DNA, 15 bp, synthetic construct
  source 1..15: mol_type = other DNA
ctgagcctcatagct

SEQ ID NO: 13846 - DNA, 15 bp, synthetic construct
  source 1..15: mol_type = other DNA
tgagattgtgtgagc

SEQ ID NO: 13847 - DNA, 15 bp, synthetic construct
  source 1..15: mol_type = other DNA
cctcaaaacctagcc

SEQ ID NO: 13848 - DNA, 15 bp, synthetic construct
  source 1..15: mol_type = other DNA
cccctatcaggtaga

SEQ ID NO: 13849 - DNA, 15 bp, synthetic construct
  source 1..15: mol_type = other DNA
tcagttccttactcg

SEQ ID NO: 13850 - DNA, 15 bp, synthetic construct
  source 1..15: mol_type = other DNA
gactcagacagtttt

SEQ ID NO: 13851 - DNA, 15 bp, synthetic construct
  source 1..15: mol_type = other DNA
ctgacattcccttcc

SEQ ID NO: 13852 - DNA, 15 bp, synthetic construct
  source 1..15: mol_type = other DNA
gtaccccctactcta

SEQ ID NO: 13853 - DNA, 15 bp, synthetic construct
  source 1..15: mol_type = other DNA
ggcagtctagagtag

SEQ ID NO: 13854 - DNA, 15 bp, synthetic construct
  source 1..15: mol_type = other DNA
ggagaataccgcttt

SEQ ID NO: 13855 - DNA, 15 bp, synthetic construct
  source 1..15: mol_type = other DNA
gcgttcatgcgtagg

SEQ ID NO: 13856 - DNA, 15 bp, synthetic construct
  source 1..15: mol_type = other DNA
tggcggactcctgat

SEQ ID NO: 13857 - DNA, 15 bp, synthetic construct
  source 1..15: mol_type = other DNA
ccttattttagagga

SEQ ID NO: 13858 - DNA, 15 bp, synthetic construct
  source 1..15: mol_type = other DNA
aagtagatgccaatt

SEQ ID NO: 13859 - DNA, 15 bp, synthetic construct
  source 1..15: mol_type = other DNA
aagtgccgaggctat

SEQ ID NO: 13860 - DNA, 15 bp, synthetic construct
  source 1..15: mol_type = other DNA
cgaccacgtgctgtg

SEQ ID NO: 13861 - DNA, 15 bp, synthetic construct
  source 1..15: mol_type = other DNA
gccatggagacatgg

SEQ ID NO: 13862 - DNA, 15 bp, synthetic construct
  source 1..15: mol_type = other DNA
tgtagtgcatgtagg

SEQ ID NO: 13863 - DNA, 15 bp, synthetic construct
  source 1..15: mol_type = other DNA
gccatggagacatgg

SEQ ID NO: 13864 - DNA, 15 bp, synthetic construct
  source 1..15: mol_type = other DNA
tgtagtgcatgtagg

SEQ ID NO: 13865 - DNA, 15 bp, synthetic construct
  source 1..15: mol_type = other DNA
tcagggaaacaaggg

SEQ ID NO: 13866 - DNA, 15 bp, synthetic construct
  source 1..15: mol_type = other DNA
agggaggtggaagtg

SEQ ID NO: 13867 - DNA, 15 bp, synthetic construct
  source 1..15: mol_type = other DNA
tgaagattaatccct

SEQ ID NO: 13868 - DNA, 15 bp, synthetic construct
  source 1..15: mol_type = other DNA
tcttggccttggtag

SEQ ID NO: 13869 - DNA, 15 bp, synthetic construct
  source 1..15: mol_type = other DNA
caaggtgacctccag

SEQ ID NO: 13870 - DNA, 15 bp, synthetic construct
  source 1..15: mol_type = other DNA
aggtggttctcccta

SEQ ID NO: 13871 - DNA, 15 bp, synthetic construct
  source 1..15: mol_type = other DNA
agctacttcagtggg

SEQ ID NO: 13872 - DNA, 15 bp, synthetic construct
  source 1..15: mol_type = other DNA
agatgtgtagacaag

SEQ ID NO: 13873 - DNA, 15 bp, synthetic construct
  source 1..15: mol_type = other DNA
agctacttcagtggg

SEQ ID NO: 13874 - DNA, 15 bp, synthetic construct
  source 1..15: mol_type = other DNA
agatgtgtagacaag

SEQ ID NO: 13875 - DNA, 15 bp, synthetic construct
  source 1..15: mol_type = other DNA
ccttaaaatctacca

SEQ ID NO: 13876 - DNA, 15 bp, synthetic construct
  source 1..15: mol_type = other DNA
atgaaccagaagctc

SEQ ID NO: 13877 - DNA, 15 bp, synthetic construct
  source 1..15: mol_type = other DNA
tggttcatctctgcc

SEQ ID NO: 13878 - DNA, 15 bp, synthetic construct
  source 1..15: mol_type = other DNA
aatctgtctcaaatt

SEQ ID NO: 13879 - DNA, 15 bp, synthetic construct
  source 1..15: mol_type = other DNA
agattggagagcgag

SEQ ID NO: 13880 - DNA, 15 bp, synthetic construct
  source 1..15: mol_type = other DNA
tgagctgtggtccgt

SEQ ID NO: 13881 - DNA, 15 bp, synthetic construct
  source 1..15: mol_type = other DNA
gagtccagttccaca

SEQ ID NO: 13882 - DNA, 15 bp, synthetic construct
  source 1..15: mol_type = other DNA
actccacggaggctt

SEQ ID NO: 13883 - DNA, 15 bp, synthetic construct
  source 1..15: mol_type = other DNA
gagtccagttccaca

SEQ ID NO: 13884 - DNA, 15 bp, synthetic construct
  source 1..15: mol_type = other DNA
actccacggaggctt

SEQ ID NO: 13885 - DNA, 15 bp, synthetic construct
  source 1..15: mol_type = other DNA
ccactccccatagat

SEQ ID NO: 13886 - DNA, 15 bp, synthetic construct
  source 1..15: mol_type = other DNA
ctcataggagtccca

SEQ ID NO: 13887 - DNA, 15 bp, synthetic construct
  source 1..15: mol_type = other DNA
ccactccccatagat

SEQ ID NO: 13888 - DNA, 15 bp, synthetic construct
  source 1..15: mol_type = other DNA
ctcataggagtccca

SEQ ID NO: 13889 - DNA, 15 bp, synthetic construct
  source 1..15: mol_type = other DNA
acaacaccactgagc

SEQ ID NO: 13890 - DNA, 15 bp, synthetic construct
  source 1..15: mol_type = other DNA
aaaattcatgagagg

SEQ ID NO: 13891 - DNA, 15 bp, synthetic construct
  source 1..15: mol_type = other DNA
cccctctcatgaatt

SEQ ID NO: 13892 - DNA, 15 bp, synthetic construct
  source 1..15: mol_type = other DNA
cagcgtggaggaatg

SEQ ID NO: 13893 - DNA, 15 bp, synthetic construct
  source 1..15: mol_type = other DNA
gctctctgtcagcag

SEQ ID NO: 13894 - DNA, 15 bp, synthetic construct
  source 1..15: mol_type = other DNA
gatacactccgaggt

SEQ ID NO: 13895 - DNA, 15 bp, synthetic construct
  source 1..15: mol_type = other DNA
atgacgaagagcagc

SEQ ID NO: 13896 - DNA, 15 bp, synthetic construct
  source 1..15: mol_type = other DNA
cctctgacagcgatc

SEQ ID NO: 13897 - DNA, 15 bp, synthetic construct
  source 1..15: mol_type = other DNA
tcgatggagaagagg

SEQ ID NO: 13898 - DNA, 15 bp, synthetic construct
  source 1..15: mol_type = other DNA
cccacccttctccag

SEQ ID NO: 13899 - DNA, 15 bp, synthetic construct
  source 1..15: mol_type = other DNA
gccttgtatggactg

SEQ ID NO: 13900 - DNA, 15 bp, synthetic construct
  source 1..15: mol_type = other DNA
cctggatgcccatac

SEQ ID NO: 13901 - DNA, 15 bp, synthetic construct
  source 1..15: mol_type = other DNA
ccatgtgccccgaag

SEQ ID NO: 13902 - DNA, 15 bp, synthetic construct
  source 1..15: mol_type = other DNA
ccgtagggatctcgt

SEQ ID NO: 13903 - DNA, 15 bp, synthetic construct
  source 1..15: mol_type = other DNA
tatccacaatctagg

SEQ ID NO: 13904 - DNA, 15 bp, synthetic construct
  source 1..15: mol_type = other DNA
cttagctgtttctca

SEQ ID NO: 13905 - DNA, 15 bp, synthetic construct
  source 1..15: mol_type = other DNA
aagccagacagaaga

SEQ ID NO: 13906 - DNA, 15 bp, synthetic construct
  source 1..15: mol_type = other DNA
gcttggacaagaaag

SEQ ID NO: 13907 - DNA, 15 bp, synthetic construct
  source 1..15: mol_type = other DNA
tgctgaccatctgcc

SEQ ID NO: 13908 - DNA, 15 bp, synthetic construct
  source 1..15: mol_type = other DNA
tggcgccatctgagt

SEQ ID NO: 13909 - DNA, 15 bp, synthetic construct
  source 1..15: mol_type = other DNA
cctcaggaaaggagt

SEQ ID NO: 13910 - DNA, 15 bp, synthetic construct
  source 1..15: mol_type = other DNA
ttggtgtcataggag

SEQ ID NO: 13911 - DNA, 15 bp, synthetic construct
  source 1..15: mol_type = other DNA
ctacacctgctttcc

SEQ ID NO: 13912 - DNA, 15 bp, synthetic construct
  source 1..15: mol_type = other DNA
ggttctctcaaggtg

SEQ ID NO: 13913 - DNA, 15 bp, synthetic construct
  source 1..15: mol_type = other DNA
gaaccctttctcctg

SEQ ID NO: 13914 - DNA, 15 bp, synthetic construct
  source 1..15: mol_type = other DNA
acaggatgggactta

SEQ ID NO: 13915 - DNA, 15 bp, synthetic construct
  source 1..15: mol_type = other DNA
taccgccaccacagc

SEQ ID NO: 13916 - DNA, 15 bp, synthetic construct
  source 1..15: mol_type = other DNA
ttctgtacctttcca

SEQ ID NO: 13917 - DNA, 15 bp, synthetic construct
  source 1..15: mol_type = other DNA
aaggagcttatgggc

SEQ ID NO: 13918 - DNA, 15 bp, synthetic construct
  source 1..15: mol_type = other DNA
ctctcccctctacag

SEQ ID NO: 13919 - DNA, 15 bp, synthetic construct
  source 1..15: mol_type = other DNA
acctggaatcctaaa

SEQ ID NO: 13920 - DNA, 15 bp, synthetic construct
  source 1..15: mol_type = other DNA
atctccctaaaccga

SEQ ID NO: 13921 - DNA, 15 bp, synthetic construct
  source 1..15: mol_type = other DNA
gttgggtcggtttag

SEQ ID NO: 13922 - DNA, 15 bp, synthetic construct
  source 1..15: mol_type = other DNA
gacctctggatcctg

SEQ ID NO: 13923 - DNA, 15 bp, synthetic construct
  source 1..15: mol_type = other DNA
gatccagaggtcttg

SEQ ID NO: 13924 - DNA, 15 bp, synthetic construct
  source 1..15: mol_type = other DNA
ccctgtatccacaat

SEQ ID NO: 13925 - DNA, 15 bp, synthetic construct
  source 1..15: mol_type = other DNA
agcatgtgacagcag

SEQ ID NO: 13926 - DNA, 15 bp, synthetic construct
  source 1..15: mol_type = other DNA
tgaagtggacaacag

SEQ ID NO: 13927 - DNA, 15 bp, synthetic construct
  source 1..15: mol_type = other DNA
ctcagtggagacaga

SEQ ID NO: 13928 - DNA, 15 bp, synthetic construct
  source 1..15: mol_type = other DNA
gtcacactcagaaac

SEQ ID NO: 13929 - DNA, 15 bp, synthetic construct
  source 1..15: mol_type = other DNA
gtgtgaccttcctca

SEQ ID NO: 13930 - DNA, 15 bp, synthetic construct
  source 1..15: mol_type = other DNA
aaggtgaagatgcac

SEQ ID NO: 13931 - DNA, 15 bp, synthetic construct
  source 1..15: mol_type = other DNA
gaccggaggtgactc

SEQ ID NO: 13932 - DNA, 15 bp, synthetic construct
  source 1..15: mol_type = other DNA
tgccagcattgagag

SEQ ID NO: 13933 - DNA, 15 bp, synthetic construct
  source 1..15: mol_type = other DNA
ggcatttgatttgtc

SEQ ID NO: 13934 - DNA, 15 bp, synthetic construct
  source 1..15: mol_type = other DNA
gatgaaggtgacaat

SEQ ID NO: 13935 - DNA, 15 bp, synthetic construct
  source 1..15: mol_type = other DNA
cacctctttgcagag

SEQ ID NO: 13936 - DNA, 15 bp, synthetic construct
  source 1..15: mol_type = other DNA
agggagggtgctttc

SEQ ID NO: 13937 - DNA, 15 bp, synthetic construct
  source 1..15: mol_type = other DNA
atgaaagggtgatga

SEQ ID NO: 13938 - DNA, 15 bp, synthetic construct
  source 1..15: mol_type = other DNA
cctttaccaattgga

SEQ ID NO: 13939 - DNA, 15 bp, synthetic construct
  source 1..15: mol_type = other DNA
agggtctctccagtc

SEQ ID NO: 13940 - DNA, 15 bp, synthetic construct
  source 1..15: mol_type = other DNA
cctttgcaccagacg

SEQ ID NO: 13941 - DNA, 15 bp, synthetic construct
  source 1..15: mol_type = other DNA
atctagagcactcac

SEQ ID NO: 13942 - DNA, 15 bp, synthetic construct
  source 1..15: mol_type = other DNA
gcccaaactgacaag

SEQ ID NO: 13943 - DNA, 15 bp, synthetic construct
  source 1..15: mol_type = other DNA
ttttaggagagtgtt

SEQ ID NO: 13944 - DNA, 15 bp, synthetic construct
  source 1..15: mol_type = other DNA
gccaaaaagggtttg

SEQ ID NO: 13945 - DNA, 15 bp, synthetic construct
  source 1..15: mol_type = other DNA
cttccatccactagt

SEQ ID NO: 13946 - DNA, 15 bp, synthetic construct
  source 1..15: mol_type = other DNA
gtttttcaggtgtcc

SEQ ID NO: 13947 - DNA, 15 bp, synthetic construct
  source 1..15: mol_type = other DNA
gcacttccttgacca

SEQ ID NO: 13948 - DNA, 15 bp, synthetic construct
  source 1..15: mol_type = other DNA
gcacttccttgacca

SEQ ID NO: 13949 - DNA, 15 bp, synthetic construct
  source 1..15: mol_type = other DNA
tggagccggagtctg

SEQ ID NO: 13950 - DNA, 15 bp, synthetic construct
  source 1..15: mol_type = other DNA
cacgtgccttctacc

SEQ ID NO: 13951 - DNA, 15 bp, synthetic construct
  source 1..15: mol_type = other DNA
tcgctacccctggac

SEQ ID NO: 13952 - DNA, 15 bp, synthetic construct
  source 1..15: mol_type = other DNA
ccgacaaggcatcgc

SEQ ID NO: 13953 - DNA, 15 bp, synthetic construct
  source 1..15: mol_type = other DNA
tcgggtggcacttga

SEQ ID NO: 13954 - DNA, 15 bp, synthetic construct
  source 1..15: mol_type = other DNA
ccctgaacaacgtag

SEQ ID NO: 13955 - DNA, 15 bp, synthetic construct
  source 1..15: mol_type = other DNA
tcgggtggcacttga

SEQ ID NO: 13956 - DNA, 15 bp, synthetic construct
  source 1..15: mol_type = other DNA
ccctgaacaacgtag

SEQ ID NO: 13957 - DNA, 15 bp, synthetic construct
  source 1..15: mol_type = other DNA
ctcaccttccagtcc

SEQ ID NO: 13958 - DNA, 15 bp, synthetic construct
  source 1..15: mol_type = other DNA
gccagtcccgtcgag

SEQ ID NO: 13959 - DNA, 15 bp, synthetic construct
  source 1..15: mol_type = other DNA
gattgatagtttcgg

SEQ ID NO: 13960 - DNA, 15 bp, synthetic construct
  source 1..15: mol_type = other DNA
agctttgggacagtg

SEQ ID NO: 13961 - DNA, 15 bp, synthetic construct
  source 1..15: mol_type = other DNA
agactcacgcagtga

SEQ ID NO: 13962 - DNA, 15 bp, synthetic construct
  source 1..15: mol_type = other DNA
gtcaagctgaaagtc

SEQ ID NO: 13963 - DNA, 15 bp, synthetic construct
  source 1..15: mol_type = other DNA
ctgcactagtcagtc

SEQ ID NO: 13964 - DNA, 15 bp, synthetic construct
  source 1..15: mol_type = other DNA
acgcctccagagtgt

SEQ ID NO: 13965 - DNA, 15 bp, synthetic construct
  source 1..15: mol_type = other DNA
aagttcggccagaaa

SEQ ID NO: 13966 - DNA, 15 bp, synthetic construct
  source 1..15: mol_type = other DNA
acccaaaggttaaat

SEQ ID NO: 13967 - DNA, 15 bp, synthetic construct
  source 1..15: mol_type = other DNA
gaacgggttgtgacc

SEQ ID NO: 13968 - DNA, 15 bp, synthetic construct
  source 1..15: mol_type = other DNA
accaagttagatacg

SEQ ID NO: 13969 - DNA, 15 bp, synthetic construct
  source 1..15: mol_type = other DNA
ccattggcttctctt

SEQ ID NO: 13970 - DNA, 15 bp, synthetic construct
  source 1..15: mol_type = other DNA
gtgaattagattcaa

SEQ ID NO: 13971 - DNA, 15 bp, synthetic construct
  source 1..15: mol_type = other DNA
aaatgggtggtaatt

SEQ ID NO: 13972 - DNA, 15 bp, synthetic construct
  source 1..15: mol_type = other DNA
tatagacaaggcagt

SEQ ID NO: 13973 - DNA, 15 bp, synthetic construct
  source 1..15: mol_type = other DNA
gatgtttactacaga

SEQ ID NO: 13974 - DNA, 15 bp, synthetic construct
  source 1..15: mol_type = other DNA
tgtttttacaaacca

SEQ ID NO: 13975 - DNA, 15 bp, synthetic construct
  source 1..15: mol_type = other DNA
ttgtaacaatttggg

SEQ ID NO: 13976 - DNA, 15 bp, synthetic construct
  source 1..15: mol_type = other DNA
caaatgaaggcagaa

SEQ ID NO: 13977 - DNA, 15 bp, synthetic construct
  source 1..15: mol_type = other DNA
attctttcccaatgc

SEQ ID NO: 13978 - DNA, 15 bp, synthetic construct
  source 1..15: mol_type = other DNA
ttccaatcaacgaaa

SEQ ID NO: 13979 - DNA, 15 bp, synthetic construct
  source 1..15: mol_type = other DNA
gtatgtggtgttctt

SEQ ID NO: 13980 - DNA, 15 bp, synthetic construct
  source 1..15: mol_type = other DNA
acctcatcacccatg

SEQ ID NO: 13981 - DNA, 15 bp, synthetic construct
  source 1..15: mol_type = other DNA
tagacattattgaga

SEQ ID NO: 13982 - DNA, 15 bp, synthetic construct
  source 1..15: mol_type = other DNA
gcctctgcaaggaca

SEQ ID NO: 13983 - DNA, 15 bp, synthetic construct
  source 1..15: mol_type = other DNA
ttcatgcatcattta

SEQ ID NO: 13984 - DNA, 15 bp, synthetic construct
  source 1..15: mol_type = other DNA
agaatgtcttccagt

SEQ ID NO: 13985 - DNA, 15 bp, synthetic construct
  source 1..15: mol_type = other DNA
actgtgaatttggcg

SEQ ID NO: 13986 - DNA, 15 bp, synthetic construct
  source 1..15: mol_type = other DNA
taggtttcagagaca

SEQ ID NO: 13987 - DNA, 15 bp, synthetic construct
  source 1..15: mol_type = other DNA
agaaaacgactgaag

SEQ ID NO: 13988 - DNA, 15 bp, synthetic construct
  source 1..15: mol_type = other DNA
tggcacttgggaatc

SEQ ID NO: 13989 - DNA, 15 bp, synthetic construct
  source 1..15: mol_type = other DNA
tggccaatacggaga

SEQ ID NO: 13990 - DNA, 15 bp, synthetic construct
  source 1..15: mol_type = other DNA
ttccaaatattctct

SEQ ID NO: 13991 - DNA, 15 bp, synthetic construct
  source 1..15: mol_type = other DNA
tcttgccttttgcag

SEQ ID NO: 13992 - DNA, 15 bp, synthetic construct
  source 1..15: mol_type = other DNA
ctaaacacagagtgt

SEQ ID NO: 13993 - DNA, 15 bp, synthetic construct
  source 1..15: mol_type = other DNA
tacaaaagagtacca

SEQ ID NO: 13994 - DNA, 15 bp, synthetic construct
  source 1..15: mol_type = other DNA
aagcccaaacatttc

SEQ ID NO: 13995 - DNA, 15 bp, synthetic construct
  source 1..15: mol_type = other DNA
tttctgccatgctca

SEQ ID NO: 13996 - DNA, 15 bp, synthetic construct
  source 1..15: mol_type = other DNA
gacttggacataatg

SEQ ID NO: 13997 - DNA, 15 bp, synthetic construct
  source 1..15: mol_type = other DNA
aaaatccctctttaa

SEQ ID NO: 13998 - DNA, 15 bp, synthetic construct
  source 1..15: mol_type = other DNA
tgtctaggtccctct

SEQ ID NO: 13999 - DNA, 15 bp, synthetic construct
  source 1..15: mol_type = other DNA
tagacaatgtgatgg

SEQ ID NO: 14000 - DNA, 15 bp, synthetic construct
  source 1..15: mol_type = other DNA
aagaaaggttttgag

SEQ ID NO: 14001 - DNA, 15 bp, synthetic construct
  source 1..15: mol_type = other DNA
aaaagaagcactgtt

SEQ ID NO: 14002 - DNA, 15 bp, synthetic construct
  source 1..15: mol_type = other DNA
tgggaaaagatgaaa

SEQ ID NO: 14003 - DNA, 15 bp, synthetic construct
  source 1..15: mol_type = other DNA
gtaatacatgtactg

SEQ ID NO: 14004 - DNA, 15 bp, synthetic construct
  source 1..15: mol_type = other DNA
cattttacaggatcg

SEQ ID NO: 14005 - DNA, 15 bp, synthetic construct
  source 1..15: mol_type = other DNA
tttggagtttgctga

SEQ ID NO: 14006 - DNA, 15 bp, synthetic construct
  source 1..15: mol_type = other DNA
acttgatcctgtatt

SEQ ID NO: 14007 - DNA, 15 bp, synthetic construct
  source 1..15: mol_type = other DNA
ggcccaacattgatg

SEQ ID NO: 14008 - DNA, 15 bp, synthetic construct
  source 1..15: mol_type = other DNA
ttatgggaaactctt

SEQ ID NO: 14009 - DNA, 15 bp, synthetic construct
  source 1..15: mol_type = other DNA
gcagtgcaagaacct

SEQ ID NO: 14010 - DNA, 15 bp, synthetic construct
  source 1..15: mol_type = other DNA
ctttgcctctaaaat

SEQ ID NO: 14011 - DNA, 15 bp, synthetic construct
  source 1..15: mol_type = other DNA
gccttcctaacaacc

SEQ ID NO: 14012 - DNA, 15 bp, synthetic construct
  source 1..15: mol_type = other DNA
atcaaagttgagact

SEQ ID NO: 14013 - DNA, 15 bp, synthetic construct
  source 1..15: mol_type = other DNA
catgcataatgctat

SEQ ID NO: 14014 - DNA, 15 bp, synthetic construct
  source 1..15: mol_type = other DNA
gctaaatagccgtca

SEQ ID NO: 14015 - DNA, 15 bp, synthetic construct
  source 1..15: mol_type = other DNA
ccaaggacatgaact

SEQ ID NO: 14016 - DNA, 15 bp, synthetic construct
  source 1..15: mol_type = other DNA
ctctcctctttttcg

SEQ ID NO: 14017 - DNA, 15 bp, synthetic construct
  source 1..15: mol_type = other DNA
ccaaggacatgaact

SEQ ID NO: 14018 - DNA, 15 bp, synthetic construct
  source 1..15: mol_type = other DNA
ctctcctctttttcg

SEQ ID NO: 14019 - DNA, 15 bp, synthetic construct
  source 1..15: mol_type = other DNA
tgtgaatgtctaggc

SEQ ID NO: 14020 - DNA, 15 bp, synthetic construct
  source 1..15: mol_type = other DNA
tcttgagggagtcgt

SEQ ID NO: 14021 - DNA, 15 bp, synthetic construct
  source 1..15: mol_type = other DNA
actcctcagttgacc

SEQ ID NO: 14022 - DNA, 15 bp, synthetic construct
  source 1..15: mol_type = other DNA
catcgtacctgagca

SEQ ID NO: 14023 - DNA, 15 bp, synthetic construct
  source 1..15: mol_type = other DNA
aggtccacgtcatca

SEQ ID NO: 14024 - DNA, 15 bp, synthetic construct
  source 1..15: mol_type = other DNA
ggcctaagttaaaga

SEQ ID NO: 14025 - DNA, 15 bp, synthetic construct
  source 1..15: mol_type = other DNA
tctctctttccgatt

SEQ ID NO: 14026 - DNA, 15 bp, synthetic construct
  source 1..15: mol_type = other DNA
ctcattgtgtcactg

SEQ ID NO: 14027 - DNA, 15 bp, synthetic construct
  source 1..15: mol_type = other DNA
cagattcgacgtagc

SEQ ID NO: 14028 - DNA, 15 bp, synthetic construct
  source 1..15: mol_type = other DNA
ctggtttttacattg

SEQ ID NO: 14029 - DNA, 15 bp, synthetic construct
  source 1..15: mol_type = other DNA
tcttccaaaaacaaa

SEQ ID NO: 14030 - DNA, 15 bp, synthetic construct
  source 1..15: mol_type = other DNA
tgttaatttagctag

SEQ ID NO: 14031 - DNA, 15 bp, synthetic construct
  source 1..15: mol_type = other DNA
attgtcttttgtcct

SEQ ID NO: 14032 - DNA, 15 bp, synthetic construct
  source 1..15: mol_type = other DNA
catgtccgaaccaga

SEQ ID NO: 14033 - DNA, 15 bp, synthetic construct
  source 1..15: mol_type = other DNA
tagtgggttctcgtg

SEQ ID NO: 14034 - DNA, 15 bp, synthetic construct
  source 1..15: mol_type = other DNA
taattcaaaatggct

SEQ ID NO: 14035 - DNA, 15 bp, synthetic construct
  source 1..15: mol_type = other DNA
cagtgagaaattact

SEQ ID NO: 14036 - DNA, 15 bp, synthetic construct
  source 1..15: mol_type = other DNA
ccaccccagctaaat

SEQ ID NO: 14037 - DNA, 15 bp, synthetic construct
  source 1..15: mol_type = other DNA
cctcccagagattgt

SEQ ID NO: 14038 - DNA, 15 bp, synthetic construct
  source 1..15: mol_type = other DNA
tgggtaggaagtcag

SEQ ID NO: 14039 - DNA, 15 bp, synthetic construct
  source 1..15: mol_type = other DNA
tgatctcctttattt

SEQ ID NO: 14040 - DNA, 15 bp, synthetic construct
  source 1..15: mol_type = other DNA
cttagtccatggctt

SEQ ID NO: 14041 - DNA, 15 bp, synthetic construct
  source 1..15: mol_type = other DNA
gctgtccagaaggca

SEQ ID NO: 14042 - DNA, 15 bp, synthetic construct
  source 1..15: mol_type = other DNA
agagaactggaggta

SEQ ID NO: 14043 - DNA, 15 bp, synthetic construct
  source 1..15: mol_type = other DNA
gctgtccagaaggca

SEQ ID NO: 14044 - DNA, 15 bp, synthetic construct
  source 1..15: mol_type = other DNA
agagaactggaggta

SEQ ID NO: 14045 - DNA, 15 bp, synthetic construct
  source 1..15: mol_type = other DNA
atgcaaacttaaaag

SEQ ID NO: 14046 - DNA, 15 bp, synthetic construct
  source 1..15: mol_type = other DNA
ggcaagttcctaacc

SEQ ID NO: 14047 - DNA, 15 bp, synthetic construct
  source 1..15: mol_type = other DNA
tcttgcccacatgac

SEQ ID NO: 14048 - DNA, 15 bp, synthetic construct
  source 1..15: mol_type = other DNA
atccttgggcccaat

SEQ ID NO: 14049 - DNA, 15 bp, synthetic construct
  source 1..15: mol_type = other DNA
cttggagaagcatgg

SEQ ID NO: 14050 - DNA, 15 bp, synthetic construct
  source 1..15: mol_type = other DNA
gcccagtcagcatcg

SEQ ID NO: 14051 - DNA, 15 bp, synthetic construct
  source 1..15: mol_type = other DNA
ctggtgtctattgca

SEQ ID NO: 14052 - DNA, 15 bp, synthetic construct
  source 1..15: mol_type = other DNA
ctctagccacggagt

SEQ ID NO: 14053 - DNA, 15 bp, synthetic construct
  source 1..15: mol_type = other DNA
acacagacactagca

SEQ ID NO: 14054 - DNA, 15 bp, synthetic construct
  source 1..15: mol_type = other DNA
acctctcctattact

SEQ ID NO: 14055 - DNA, 15 bp, synthetic construct
  source 1..15: mol_type = other DNA
caggtaattataaca

SEQ ID NO: 14056 - DNA, 15 bp, synthetic construct
  source 1..15: mol_type = other DNA
ttttgctttttccaa

SEQ ID NO: 14057 - DNA, 15 bp, synthetic construct
  source 1..15: mol_type = other DNA
cagttcgaaaaatca

SEQ ID NO: 14058 - DNA, 15 bp, synthetic construct
  source 1..15: mol_type = other DNA
tctttaaatggccta

SEQ ID NO: 14059 - DNA, 15 bp, synthetic construct
  source 1..15: mol_type = other DNA
gtgtcatgtttactt

SEQ ID NO: 14060 - DNA, 15 bp, synthetic construct
  source 1..15: mol_type = other DNA
ccatctttgttttgc

SEQ ID NO: 14061 - DNA, 15 bp, synthetic construct
  source 1..15: mol_type = other DNA
cacatttttgtatca

SEQ ID NO: 14062 - DNA, 15 bp, synthetic construct
  source 1..15: mol_type = other DNA
tcagtgttctattaa

SEQ ID NO: 14063 - DNA, 15 bp, synthetic construct
  source 1..15: mol_type = other DNA
cacataaccaatata

SEQ ID NO: 14064 - DNA, 15 bp, synthetic construct
  source 1..15: mol_type = other DNA
gcttggtaattattt

SEQ ID NO: 14065 - DNA, 15 bp, synthetic construct
  source 1..15: mol_type = other DNA
tgctgtgaaagaaag

SEQ ID NO: 14066 - DNA, 15 bp, synthetic construct
  source 1..15: mol_type = other DNA
acctaaagtcagtat

SEQ ID NO: 14067 - DNA, 15 bp, synthetic construct
  source 1..15: mol_type = other DNA
ctgatcacttaagca

SEQ ID NO: 14068 - DNA, 15 bp, synthetic construct
  source 1..15: mol_type = other DNA
atccttctctcctac

SEQ ID NO: 14069 - DNA, 15 bp, synthetic construct
  source 1..15: mol_type = other DNA
tgtcatttcacttac

SEQ ID NO: 14070 - DNA, 15 bp, synthetic construct
  source 1..15: mol_type = other DNA
ctggattgttactgg

SEQ ID NO: 14071 - DNA, 15 bp, synthetic construct
  source 1..15: mol_type = other DNA
tagagggagcaacac

SEQ ID NO: 14072 - DNA, 15 bp, synthetic construct
  source 1..15: mol_type = other DNA
cttaccgagtatttc

SEQ ID NO: 14073 - DNA, 15 bp, synthetic construct
  source 1..15: mol_type = other DNA
aggcactttctacaa

SEQ ID NO: 14074 - DNA, 15 bp, synthetic construct
  source 1..15: mol_type = other DNA
tgaatattcttcatc

SEQ ID NO: 14075 - DNA, 15 bp, synthetic construct
  source 1..15: mol_type = other DNA
gttctggtgcttaga

SEQ ID NO: 14076 - DNA, 15 bp, synthetic construct
  source 1..15: mol_type = other DNA
aatactaagccccat

SEQ ID NO: 14077 - DNA, 15 bp, synthetic construct
  source 1..15: mol_type = other DNA
aaagtccccagcttt

SEQ ID NO: 14078 - DNA, 15 bp, synthetic construct
  source 1..15: mol_type = other DNA
catcaagtaggacat

SEQ ID NO: 14079 - DNA, 15 bp, synthetic construct
  source 1..15: mol_type = other DNA
ccacctgttctctga

SEQ ID NO: 14080 - DNA, 15 bp, synthetic construct
  source 1..15: mol_type = other DNA
tttgcaacagggatc

SEQ ID NO: 14081 - DNA, 15 bp, synthetic construct
  source 1..15: mol_type = other DNA
ttgtcaatgtcttac

SEQ ID NO: 14082 - DNA, 15 bp, synthetic construct
  source 1..15: mol_type = other DNA
cgccatgacgagatc

SEQ ID NO: 14083 - DNA, 15 bp, synthetic construct
  source 1..15: mol_type = other DNA
acagaccggtggaag

SEQ ID NO: 14084 - DNA, 15 bp, synthetic construct
  source 1..15: mol_type = other DNA
ttgcttctacacttg

SEQ ID NO: 14085 - DNA, 15 bp, synthetic construct
  source 1..15: mol_type = other DNA
gttcctttcagtaga

SEQ ID NO: 14086 - DNA, 15 bp, synthetic construct
  source 1..15: mol_type = other DNA
tgacattggtgattc

SEQ ID NO: 14087 - DNA, 15 bp, synthetic construct
  source 1..15: mol_type = other DNA
aaaaatccaacagtc

SEQ ID NO: 14088 - DNA, 15 bp, synthetic construct
  source 1..15: mol_type = other DNA
aacccaagtatagga

SEQ ID NO: 14089 - DNA, 15 bp, synthetic construct
  source 1..15: mol_type = other DNA
gcctgacaataaatt

SEQ ID NO: 14090 - DNA, 15 bp, synthetic construct
  source 1..15: mol_type = other DNA
tgcgcaaggaattca

SEQ ID NO: 14091 - DNA, 15 bp, synthetic construct
  source 1..15: mol_type = other DNA
ggaacgttgtttctt

SEQ ID NO: 14092 - DNA, 15 bp, synthetic construct
  source 1..15: mol_type = other DNA
ctgggagtctagttt

SEQ ID NO: 14093 - DNA, 15 bp, synthetic construct
  source 1..15: mol_type = other DNA
agcaggatttggagc

SEQ ID NO: 14094 - DNA, 15 bp, synthetic construct
  source 1..15: mol_type = other DNA
tctgagcactctgtt

SEQ ID NO: 14095 - DNA, 15 bp, synthetic construct
  source 1..15: mol_type = other DNA
gagtggctttggaga

SEQ ID NO: 14096 - DNA, 15 bp, synthetic construct
  source 1..15: mol_type = other DNA
tgacagctctgtgga

SEQ ID NO: 14097 - DNA, 15 bp, synthetic construct
  source 1..15: mol_type = other DNA
tggcagaagcaatga

SEQ ID NO: 14098 - DNA, 15 bp, synthetic construct
  source 1..15: mol_type = other DNA
ggctgtcgaaatgag

SEQ ID NO: 14099 - DNA, 15 bp, synthetic construct
  source 1..15: mol_type = other DNA
tctcaagatgaaaat

SEQ ID NO: 14100 - DNA, 15 bp, synthetic construct
  source 1..15: mol_type = other DNA
agtacagtaccttgt

SEQ ID NO: 14101 - DNA, 15 bp, synthetic construct
  source 1..15: mol_type = other DNA
aatgctcacgcactt

SEQ ID NO: 14102 - DNA, 15 bp, synthetic construct
  source 1..15: mol_type = other DNA
gagatttccaaagaa

SEQ ID NO: 14103 - DNA, 15 bp, synthetic construct
  source 1..15: mol_type = other DNA
gaagcttactaaggc

SEQ ID NO: 14104 - DNA, 15 bp, synthetic construct
  source 1..15: mol_type = other DNA
tatcatgctaagcag

SEQ ID NO: 14105 - DNA, 15 bp, synthetic construct
  source 1..15: mol_type = other DNA
gacaataactccatc

SEQ ID NO: 14106 - DNA, 15 bp, synthetic construct
  source 1..15: mol_type = other DNA
tcatcttgctaaagt

SEQ ID NO: 14107 - DNA, 15 bp, synthetic construct
  source 1..15: mol_type = other DNA
acctagaagtacgtc

SEQ ID NO: 14108 - DNA, 15 bp, synthetic construct
  source 1..15: mol_type = other DNA
ttaaacactatgaaa

SEQ ID NO: 14109 - DNA, 15 bp, synthetic construct
  source 1..15: mol_type = other DNA
aaaattaacctcttt

SEQ ID NO: 14110 - DNA, 15 bp, synthetic construct
  source 1..15: mol_type = other DNA
acgacctaccctaac

SEQ ID NO: 14111 - DNA, 15 bp, synthetic construct
  source 1..15: mol_type = other DNA
tttccttctctcaga

SEQ ID NO: 14112 - DNA, 15 bp, synthetic construct
  source 1..15: mol_type = other DNA
aactgcgaatacact

SEQ ID NO: 14113 - DNA, 15 bp, synthetic construct
  source 1..15: mol_type = other DNA
tcttttcattctgtt

SEQ ID NO: 14114 - DNA, 15 bp, synthetic construct
  source 1..15: mol_type = other DNA
attaaccttttctcc

SEQ ID NO: 14115 - DNA, 15 bp, synthetic construct
  source 1..15: mol_type = other DNA
ttaagggtagtagta

SEQ ID NO: 14116 - DNA, 15 bp, synthetic construct
  source 1..15: mol_type = other DNA
tctttggcaatactc

SEQ ID NO: 14117 - DNA, 15 bp, synthetic construct
  source 1..15: mol_type = other DNA
agctggtggtagatt

SEQ ID NO: 14118 - DNA, 15 bp, synthetic construct
  source 1..15: mol_type = other DNA
ttgttttgctcacac

SEQ ID NO: 14119 - DNA, 15 bp, synthetic construct
  source 1..15: mol_type = other DNA
ttgacttgatttgat

SEQ ID NO: 14120 - DNA, 15 bp, synthetic construct
  source 1..15: mol_type = other DNA
gcaaaacaaagatcc

SEQ ID NO: 14121 - DNA, 15 bp, synthetic construct
  source 1..15: mol_type = other DNA
tttatggttgatgat

SEQ ID NO: 14122 - DNA, 15 bp, synthetic construct
  source 1..15: mol_type = other DNA
cagccacaaaaatct

SEQ ID NO: 14123 - DNA, 15 bp, synthetic construct
  source 1..15: mol_type = other DNA
ccctggttattggac

SEQ ID NO: 14124 - DNA, 15 bp, synthetic construct
  source 1..15: mol_type = other DNA
ttcacaaagattggc

SEQ ID NO: 14125 - DNA, 15 bp, synthetic construct
  source 1..15: mol_type = other DNA
ttgaggacaaaggca

SEQ ID NO: 14126 - DNA, 15 bp, synthetic construct
  source 1..15: mol_type = other DNA
ataggctttcaatta

SEQ ID NO: 14127 - DNA, 15 bp, synthetic construct
  source 1..15: mol_type = other DNA
acatactaagaaaaa

SEQ ID NO: 14128 - DNA, 15 bp, synthetic construct
  source 1..15: mol_type = other DNA
tacacttaagtatgt

SEQ ID NO: 14129 - DNA, 15 bp, synthetic construct
  source 1..15: mol_type = other DNA
tctgttgaatatgtc

SEQ ID NO: 14130 - DNA, 15 bp, synthetic construct
  source 1..15: mol_type = other DNA
acatcaaagagcatg

SEQ ID NO: 14131 - DNA, 15 bp, synthetic construct
  source 1..15: mol_type = other DNA
gagcaaagtgagttt

SEQ ID NO: 14132 - DNA, 15 bp, synthetic construct
  source 1..15: mol_type = other DNA
ttttcctttcagcta

SEQ ID NO: 14133 - DNA, 15 bp, synthetic construct
  source 1..15: mol_type = other DNA
aagatttatggaaaa

SEQ ID NO: 14134 - DNA, 15 bp, synthetic construct
  source 1..15: mol_type = other DNA
gatcttgtgaaccca

SEQ ID NO: 14135 - DNA, 15 bp, synthetic construct
  source 1..15: mol_type = other DNA
aaagcactataggag

SEQ ID NO: 14136 - DNA, 15 bp, synthetic construct
  source 1..15: mol_type = other DNA
gagaagaagaaatcg

SEQ ID NO: 14137 - DNA, 15 bp, synthetic construct
  source 1..15: mol_type = other DNA
ttactgctcagtggt

SEQ ID NO: 14138 - DNA, 15 bp, synthetic construct
  source 1..15: mol_type = other DNA
ttcttaccactgaga

SEQ ID NO: 14139 - DNA, 15 bp, synthetic construct
  source 1..15: mol_type = other DNA
tctgtatgaacctct

SEQ ID NO: 14140 - DNA, 15 bp, synthetic construct
  source 1..15: mol_type = other DNA
tttttacctgcttct

SEQ ID NO: 14141 - DNA, 15 bp, synthetic construct
  source 1..15: mol_type = other DNA
tgtcatttgcctcaa

SEQ ID NO: 14142 - DNA, 15 bp, synthetic construct
  source 1..15: mol_type = other DNA
cccctcaacagaaat

SEQ ID NO: 14143 - DNA, 15 bp, synthetic construct
  source 1..15: mol_type = other DNA
atttactgaatcatt

SEQ ID NO: 14144 - DNA, 15 bp, synthetic construct
  source 1..15: mol_type = other DNA
ttacctcagtagtgc

SEQ ID NO: 14145 - DNA, 15 bp, synthetic construct
  source 1..15: mol_type = other DNA
ataacaaaaactgta

SEQ ID NO: 14146 - DNA, 15 bp, synthetic construct
  source 1..15: mol_type = other DNA
aaaggtctgggctga

SEQ ID NO: 14147 - DNA, 15 bp, synthetic construct
  source 1..15: mol_type = other DNA
agtacaggtgtaagt

SEQ ID NO: 14148 - DNA, 15 bp, synthetic construct
  source 1..15: mol_type = other DNA
aagctgcataaaaat

SEQ ID NO: 14149 - DNA, 15 bp, synthetic construct
  source 1..15: mol_type = other DNA
acagagaagtccgta

SEQ ID NO: 14150 - DNA, 15 bp, synthetic construct
  source 1..15: mol_type = other DNA
catcatgaagtaggc

SEQ ID NO: 14151 - DNA, 15 bp, synthetic construct
  source 1..15: mol_type = other DNA
taaaagtgaaaactt

SEQ ID NO: 14152 - DNA, 15 bp, synthetic construct
  source 1..15: mol_type = other DNA
taagatgcagtaggc

SEQ ID NO: 14153 - DNA, 15 bp, synthetic construct
  source 1..15: mol_type = other DNA
ttatatgtctgcctt

SEQ ID NO: 14154 - DNA, 15 bp, synthetic construct
  source 1..15: mol_type = other DNA
gtgagtgttttggtt

SEQ ID NO: 14155 - DNA, 15 bp, synthetic construct
  source 1..15: mol_type = other DNA
ttgattcagtacctg

SEQ ID NO: 14156 - DNA, 15 bp, synthetic construct
  source 1..15: mol_type = other DNA
ccaggtacagtttgt

SEQ ID NO: 14157 - DNA, 15 bp, synthetic construct
  source 1..15: mol_type = other DNA
agttagcagatatgg

SEQ ID NO: 14158 - DNA, 15 bp, synthetic construct
  source 1..15: mol_type = other DNA
ctcagagtcagtcta

SEQ ID NO: 14159 - DNA, 15 bp, synthetic construct
  source 1..15: mol_type = other DNA
attcctgaaccactc

SEQ ID NO: 14160 - DNA, 15 bp, synthetic construct
  source 1..15: mol_type = other DNA
accctaatgggtcaa

SEQ ID NO: 14161 - DNA, 15 bp, synthetic construct
  source 1..15: mol_type = other DNA
ctaaggaagttgctg

SEQ ID NO: 14162 - DNA, 15 bp, synthetic construct
  source 1..15: mol_type = other DNA
tgatatccctacatg

SEQ ID NO: 14163 - DNA, 15 bp, synthetic construct
  source 1..15: mol_type = other DNA
acacaactgaaaggg

SEQ ID NO: 14164 - DNA, 15 bp, synthetic construct
  source 1..15: mol_type = other DNA
tacagtttgctaggc

SEQ ID NO: 14165 - DNA, 15 bp, synthetic construct
  source 1..15: mol_type = other DNA
tgaaaggtgtgagtt

SEQ ID NO: 14166 - DNA, 15 bp, synthetic construct
  source 1..15: mol_type = other DNA
ttcctttatcgggta

SEQ ID NO: 14167 - DNA, 15 bp, synthetic construct
  source 1..15: mol_type = other DNA
tgatttgcattacaa

SEQ ID NO: 14168 - DNA, 15 bp, synthetic construct
  source 1..15: mol_type = other DNA
agcattgtagtttgt

SEQ ID NO: 14169 - DNA, 15 bp, synthetic construct
  source 1..15: mol_type = other DNA
agggatgtgtttggc

SEQ ID NO: 14170 - DNA, 15 bp, synthetic construct
  source 1..15: mol_type = other DNA
catgaacctttcaag

SEQ ID NO: 14171 - DNA, 15 bp, synthetic construct
  source 1..15: mol_type = other DNA
agcctaacagaaaaa

SEQ ID NO: 14172 - DNA, 15 bp, synthetic construct
  source 1..15: mol_type = other DNA
tagcatactttggtc

SEQ ID NO: 14173 - DNA, 15 bp, synthetic construct
  source 1..15: mol_type = other DNA
tccccaaggagtgcg

SEQ ID NO: 14174 - DNA, 15 bp, synthetic construct
  source 1..15: mol_type = other DNA
tagtgtgacctttca

SEQ ID NO: 14175 - DNA, 15 bp, synthetic construct
  source 1..15: mol_type = other DNA
gactgctttacttgg

SEQ ID NO: 14176 - DNA, 15 bp, synthetic construct
  source 1..15: mol_type = other DNA
gctgtccatgcactg

SEQ ID NO: 14177 - DNA, 15 bp, synthetic construct
  source 1..15: mol_type = other DNA
gactgcttaccaagg

SEQ ID NO: 14178 - DNA, 15 bp, synthetic construct
  source 1..15: mol_type = other DNA
tcctcatctatgcca

SEQ ID NO: 14179 - DNA, 15 bp, synthetic construct
  source 1..15: mol_type = other DNA
accacctactggcaa

SEQ ID NO: 14180 - DNA, 15 bp, synthetic construct
  source 1..15: mol_type = other DNA
agttgaaacgctgac

SEQ ID NO: 14181 - DNA, 15 bp, synthetic construct
  source 1..15: mol_type = other DNA
aattgttcttgagta

SEQ ID NO: 14182 - DNA, 15 bp, synthetic construct
  source 1..15: mol_type = other DNA
aatggctcaatacaa

SEQ ID NO: 14183 - DNA, 15 bp, synthetic construct
  source 1..15: mol_type = other DNA
ctgcaactgtgtcct

SEQ ID NO: 14184 - DNA, 15 bp, synthetic construct
  source 1..15: mol_type = other DNA
gcatttataccacac

SEQ ID NO: 14185 - DNA, 15 bp, synthetic construct
  source 1..15: mol_type = other DNA
catcctcatgttgtt

SEQ ID NO: 14186 - DNA, 15 bp, synthetic construct
  source 1..15: mol_type = other DNA
atcagtggttgagtg

SEQ ID NO: 14187 - DNA, 15 bp, synthetic construct
  source 1..15: mol_type = other DNA
aagagaaacttcttc

SEQ ID NO: 14188 - DNA, 15 bp, synthetic construct
  source 1..15: mol_type = other DNA
gatagtaacagaaac

SEQ ID NO: 14189 - DNA, 15 bp, synthetic construct
  source 1..15: mol_type = other DNA
cagaagtggaaaaaa

SEQ ID NO: 14190 - DNA, 15 bp, synthetic construct
  source 1..15: mol_type = other DNA
gtgactactttttca

SEQ ID NO: 14191 - DNA, 15 bp, synthetic construct
  source 1..15: mol_type = other DNA
cttttacaagtcata

SEQ ID NO: 14192 - DNA, 15 bp, synthetic construct
  source 1..15: mol_type = other DNA
attgttctcggtgga

SEQ ID NO: 14193 - DNA, 15 bp, synthetic construct
  source 1..15: mol_type = other DNA
aacgttaggagagcc

SEQ ID NO: 14194 - DNA, 15 bp, synthetic construct
  source 1..15: mol_type = other DNA
aatgagttgctttat

SEQ ID NO: 14195 - DNA, 15 bp, synthetic construct
  source 1..15: mol_type = other DNA
aattccgagcataca

SEQ ID NO: 14196 - DNA, 15 bp, synthetic construct
  source 1..15: mol_type = other DNA
ggcaagttttgtgta

SEQ ID NO: 14197 - DNA, 15 bp, synthetic construct
  source 1..15: mol_type = other DNA
atgctctaagtgtag

SEQ ID NO: 14198 - DNA, 15 bp, synthetic construct
  source 1..15: mol_type = other DNA
aagctggtcaaaaag

SEQ ID NO: 14199 - DNA, 15 bp, synthetic construct
  source 1..15: mol_type = other DNA
agtgagaaggaaata

SEQ ID NO: 14200 - DNA, 15 bp, synthetic construct
  source 1..15: mol_type = other DNA
aagaagaatattctc

SEQ ID NO: 14201 - DNA, 15 bp, synthetic construct
  source 1..15: mol_type = other DNA
cccaattgttctgaa

SEQ ID NO: 14202 - DNA, 15 bp, synthetic construct
  source 1..15: mol_type = other DNA
ctttcatatttacaa

SEQ ID NO: 14203 - DNA, 15 bp, synthetic construct
  source 1..15: mol_type = other DNA
ttttcacaaaacgat

SEQ ID NO: 14204 - DNA, 15 bp, synthetic construct
  source 1..15: mol_type = other DNA
gttttccaggttcta

SEQ ID NO: 14205 - DNA, 15 bp, synthetic construct
  source 1..15: mol_type = other DNA
aaattcaaaaacttg

SEQ ID NO: 14206 - DNA, 15 bp, synthetic construct
  source 1..15: mol_type = other DNA
ggctagcttgttctg

SEQ ID NO: 14207 - DNA, 15 bp, synthetic construct
  source 1..15: mol_type = other DNA
aggacctaataagcc

SEQ ID NO: 14208 - DNA, 15 bp, synthetic construct
  source 1..15: mol_type = other DNA
catggcaaaccttat

SEQ ID NO: 14209 - DNA, 15 bp, synthetic construct
  source 1..15: mol_type = other DNA
cgatattatgcatta

SEQ ID NO: 14210 - DNA, 15 bp, synthetic construct
  source 1..15: mol_type = other DNA
aattatttgccatgt

SEQ ID NO: 14211 - DNA, 15 bp, synthetic construct
  source 1..15: mol_type = other DNA
gttatccagaatagt

SEQ ID NO: 14212 - DNA, 15 bp, synthetic construct
  source 1..15: mol_type = other DNA
tgctgcagagaaatt

SEQ ID NO: 14213 - DNA, 15 bp, synthetic construct
  source 1..15: mol_type = other DNA
aatctcttaccagtc

SEQ ID NO: 14214 - DNA, 15 bp, synthetic construct
  source 1..15: mol_type = other DNA
aaggagagatgttga

SEQ ID NO: 14215 - DNA, 15 bp, synthetic construct
  source 1..15: mol_type = other DNA
tggaatgtgatgaca

SEQ ID NO: 14216 - DNA, 15 bp, synthetic construct
  source 1..15: mol_type = other DNA
catcttgggcatcag

SEQ ID NO: 14217 - DNA, 15 bp, synthetic construct
  source 1..15: mol_type = other DNA
gtcttggattcatag

SEQ ID NO: 14218 - DNA, 15 bp, synthetic construct
  source 1..15: mol_type = other DNA
caacgttgggaactt

SEQ ID NO: 14219 - DNA, 15 bp, synthetic construct
  source 1..15: mol_type = other DNA
ctaaaaatgatcaca

SEQ ID NO: 14220 - DNA, 15 bp, synthetic construct
  source 1..15: mol_type = other DNA
gtctggtagaagtgg

SEQ ID NO: 14221 - DNA, 15 bp, synthetic construct
  source 1..15: mol_type = other DNA
tttctctctggactt

SEQ ID NO: 14222 - DNA, 15 bp, synthetic construct
  source 1..15: mol_type = other DNA
tattgttggtacttc

SEQ ID NO: 14223 - DNA, 15 bp, synthetic construct
  source 1..15: mol_type = other DNA
tggcttatcactgct

SEQ ID NO: 14224 - DNA, 15 bp, synthetic construct
  source 1..15: mol_type = other DNA
ttggtttggcaatac

SEQ ID NO: 14225 - DNA, 15 bp, synthetic construct
  source 1..15: mol_type = other DNA
ggagttttaggcatt

SEQ ID NO: 14226 - DNA, 15 bp, synthetic construct
  source 1..15: mol_type = other DNA
cagatgatcattgtc

SEQ ID NO: 14227 - DNA, 15 bp, synthetic construct
  source 1..15: mol_type = other DNA
aatttcagttcaata

SEQ ID NO: 14228 - DNA, 15 bp, synthetic construct
  source 1..15: mol_type = other DNA
tttcaccagaacact

SEQ ID NO: 14229 - DNA, 15 bp, synthetic construct
  source 1..15: mol_type = other DNA
cttttggccagatta

SEQ ID NO: 14230 - DNA, 15 bp, synthetic construct
  source 1..15: mol_type = other DNA
gtctgtgattgttgt

SEQ ID NO: 14231 - DNA, 15 bp, synthetic construct
  source 1..15: mol_type = other DNA
tttcattacaatggg

SEQ ID NO: 14232 - DNA, 15 bp, synthetic construct
  source 1..15: mol_type = other DNA
tgaaaagccaaacac

SEQ ID NO: 14233 - DNA, 15 bp, synthetic construct
  source 1..15: mol_type = other DNA
aaggattttacacat

SEQ ID NO: 14234 - DNA, 15 bp, synthetic construct
  source 1..15: mol_type = other DNA
ttttcctacctcctt

SEQ ID NO: 14235 - DNA, 15 bp, synthetic construct
  source 1..15: mol_type = other DNA
gccaggtcatcaaat

SEQ ID NO: 14236 - DNA, 15 bp, synthetic construct
  source 1..15: mol_type = other DNA
cccctgacagataat

SEQ ID NO: 14237 - DNA, 15 bp, synthetic construct
  source 1..15: mol_type = other DNA
gtctacttcctccac

SEQ ID NO: 14238 - DNA, 15 bp, synthetic construct
  source 1..15: mol_type = other DNA
ctaccagattatctt

SEQ ID NO: 14239 - DNA, 15 bp, synthetic construct
  source 1..15: mol_type = other DNA
gcattttaatacaac

SEQ ID NO: 14240 - DNA, 15 bp, synthetic construct
  source 1..15: mol_type = other DNA
gagaatgatgaactg

SEQ ID NO: 14241 - DNA, 15 bp, synthetic construct
  source 1..15: mol_type = other DNA
tccactggttagtct

SEQ ID NO: 14242 - DNA, 15 bp, synthetic construct
  source 1..15: mol_type = other DNA
aataatacctttctt

SEQ ID NO: 14243 - DNA, 15 bp, synthetic construct
  source 1..15: mol_type = other DNA
tgtgtgtgtctatgt

SEQ ID NO: 14244 - DNA, 15 bp, synthetic construct
  source 1..15: mol_type = other DNA
ctccgggcagaaatg

SEQ ID NO: 14245 - DNA, 15 bp, synthetic construct
  source 1..15: mol_type = other DNA
atgggcctctttttg

SEQ ID NO: 14246 - DNA, 15 bp, synthetic construct
  source 1..15: mol_type = other DNA
tgtgaaatatgttcc

SEQ ID NO: 14247 - DNA, 15 bp, synthetic construct
  source 1..15: mol_type = other DNA
agcaatctaccacat

SEQ ID NO: 14248 - DNA, 15 bp, synthetic construct
  source 1..15: mol_type = other DNA
tagaggatttaaagt

SEQ ID NO: 14249 - DNA, 15 bp, synthetic construct
  source 1..15: mol_type = other DNA
ctgtgactccttttg

SEQ ID NO: 14250 - DNA, 15 bp, synthetic construct
  source 1..15: mol_type = other DNA
aagttgaggcaaaaa

SEQ ID NO: 14251 - DNA, 15 bp, synthetic construct
  source 1..15: mol_type = other DNA
aaaaatgagacaata

SEQ ID NO: 14252 - DNA, 15 bp, synthetic construct
  source 1..15: mol_type = other DNA
cagacagtagcagaa

SEQ ID NO: 14253 - DNA, 15 bp, synthetic construct
  source 1..15: mol_type = other DNA
caagagtgaggaaag

SEQ ID NO: 14254 - DNA, 15 bp, synthetic construct
  source 1..15: mol_type = other DNA
agccttcattgccta

SEQ ID NO: 14255 - DNA, 15 bp, synthetic construct
  source 1..15: mol_type = other DNA
tcagagctatgtttt

SEQ ID NO: 14256 - DNA, 15 bp, synthetic construct
  source 1..15: mol_type = other DNA
aaaacaggagcaaag

SEQ ID NO: 14257 - DNA, 15 bp, synthetic construct
  source 1..15: mol_type = other DNA
agccgtttgtttgaa

SEQ ID NO: 14258 - DNA, 15 bp, synthetic construct
  source 1..15: mol_type = other DNA
agtctagatacatac

SEQ ID NO: 14259 - DNA, 15 bp, synthetic construct
  source 1..15: mol_type = other DNA
caatcacatgcaagt

SEQ ID NO: 14260 - DNA, 15 bp, synthetic construct
  source 1..15: mol_type = other DNA
aatctcaccacacat

SEQ ID NO: 14261 - DNA, 15 bp, synthetic construct
  source 1..15: mol_type = other DNA
gcaatggtttgatga

SEQ ID NO: 14262 - DNA, 15 bp, synthetic construct
  source 1..15: mol_type = other DNA
aagggaaaaagatac

SEQ ID NO: 14263 - DNA, 15 bp, synthetic construct
  source 1..15: mol_type = other DNA
atgcattgccctcat

SEQ ID NO: 14264 - DNA, 15 bp, synthetic construct
  source 1..15: mol_type = other DNA
tacaggatcaatccc

SEQ ID NO: 14265 - DNA, 15 bp, synthetic construct
  source 1..15: mol_type = other DNA
ttccttagagcgatc

SEQ ID NO: 14266 - DNA, 15 bp, synthetic construct
  source 1..15: mol_type = other DNA
agtgttaactcacag

SEQ ID NO: 14267 - DNA, 15 bp, synthetic construct
  source 1..15: mol_type = other DNA
ctctagactatgcta

SEQ ID NO: 14268 - DNA, 15 bp, synthetic construct
  source 1..15: mol_type = other DNA
gttatgtgcctgatg

SEQ ID NO: 14269 - DNA, 15 bp, synthetic construct
  source 1..15: mol_type = other DNA
tgttctgttgcacaa

SEQ ID NO: 14270 - DNA, 15 bp, synthetic construct
  source 1..15: mol_type = other DNA
ggaatgttatttgtt

SEQ ID NO: 14271 - DNA, 15 bp, synthetic construct
  source 1..15: mol_type = other DNA
gccagctacaactac

SEQ ID NO: 14272 - DNA, 15 bp, synthetic construct
  source 1..15: mol_type = other DNA
acattggagatggaa

SEQ ID NO: 14273 - DNA, 15 bp, synthetic construct
  source 1..15: mol_type = other DNA
atcctttaaagtgct

SEQ ID NO: 14274 - DNA, 15 bp, synthetic construct
  source 1..15: mol_type = other DNA
ttggagggaagaaac

SEQ ID NO: 14275 - DNA, 15 bp, synthetic construct
  source 1..15: mol_type = other DNA
ttgtgccaagggtaa

SEQ ID NO: 14276 - DNA, 15 bp, synthetic construct
  source 1..15: mol_type = other DNA
agtcgctcattgcca

SEQ ID NO: 14277 - DNA, 15 bp, synthetic construct
  source 1..15: mol_type = other DNA
tgcagtttagatgta

SEQ ID NO: 14278 - DNA, 15 bp, synthetic construct
  source 1..15: mol_type = other DNA
atctcatgtgccact

SEQ ID NO: 14279 - DNA, 15 bp, synthetic construct
  source 1..15: mol_type = other DNA
agaagagccaatact

SEQ ID NO: 14280 - DNA, 15 bp, synthetic construct
  source 1..15: mol_type = other DNA
agatgctgaaaacga

SEQ ID NO: 14281 - DNA, 15 bp, synthetic construct
  source 1..15: mol_type = other DNA
atggctaaaatgctt

SEQ ID NO: 14282 - DNA, 15 bp, synthetic construct
  source 1..15: mol_type = other DNA
accaaaaattgatgt

SEQ ID NO: 14283 - DNA, 15 bp, synthetic construct
  source 1..15: mol_type = other DNA
tccagacaaaccact

SEQ ID NO: 14284 - DNA, 15 bp, synthetic construct
  source 1..15: mol_type = other DNA
tgacattgtttccat

SEQ ID NO: 14285 - DNA, 15 bp, synthetic construct
  source 1..15: mol_type = other DNA
taacgaagtccgtaa

SEQ ID NO: 14286 - DNA, 15 bp, synthetic construct
  source 1..15: mol_type = other DNA
gaactataatgcttt

SEQ ID NO: 14287 - DNA, 15 bp, synthetic construct
  source 1..15: mol_type = other DNA
gattattcatctgcc

SEQ ID NO: 14288 - DNA, 15 bp, synthetic construct
  source 1..15: mol_type = other DNA
gaacaagtggagtct

SEQ ID NO: 14289 - DNA, 15 bp, synthetic construct
  source 1..15: mol_type = other DNA
caatagtgtgaagtt

SEQ ID NO: 14290 - DNA, 15 bp, synthetic construct
  source 1..15: mol_type = other DNA
gttttaaggagatgt

SEQ ID NO: 14291 - DNA, 15 bp, synthetic construct
  source 1..15: mol_type = other DNA
caaggttcaagaatc

SEQ ID NO: 14292 - DNA, 15 bp, synthetic construct
  source 1..15: mol_type = other DNA
gcataactcagtgta

SEQ ID NO: 14293 - DNA, 15 bp, synthetic construct
  source 1..15: mol_type = other DNA
gcaattcaaacatcc

SEQ ID NO: 14294 - DNA, 15 bp, synthetic construct
  source 1..15: mol_type = other DNA
gaaaagaaaatgaga

SEQ ID NO: 14295 - DNA, 15 bp, synthetic construct
  source 1..15: mol_type = other DNA
tttgcaaacacccaa

SEQ ID NO: 14296 - DNA, 15 bp, synthetic construct
  source 1..15: mol_type = other DNA
gatgtgtctttgtgc

SEQ ID NO: 14297 - DNA, 15 bp, synthetic construct
  source 1..15: mol_type = other DNA
atccatctgaagagc

SEQ ID NO: 14298 - DNA, 15 bp, synthetic construct
  source 1..15: mol_type = other DNA
gtctttttgttttgt

SEQ ID NO: 14299 - DNA, 15 bp, synthetic construct
  source 1..15: mol_type = other DNA
atccatctgaagagc

SEQ ID NO: 14300 - DNA, 15 bp, synthetic construct
  source 1..15: mol_type = other DNA
gtctttttgttttgt

SEQ ID NO: 14301 - DNA, 15 bp, synthetic construct
  source 1..15: mol_type = other DNA
agaatatactgcaat

SEQ ID NO: 14302 - DNA, 15 bp, synthetic construct
  source 1..15: mol_type = other DNA
aaaccacttttcagg

SEQ ID NO: 14303 - DNA, 15 bp, synthetic construct
  source 1..15: mol_type = other DNA
atgacgaattacagc

SEQ ID NO: 14304 - DNA, 15 bp, synthetic construct
  source 1..15: mol_type = other DNA
atctgtgttgcttac

SEQ ID NO: 14305 - DNA, 15 bp, synthetic construct
  source 1..15: mol_type = other DNA
ttgttattcacatgt

SEQ ID NO: 14306 - DNA, 15 bp, synthetic construct
  source 1..15: mol_type = other DNA
tgggtgtaagagttg

SEQ ID NO: 14307 - DNA, 15 bp, synthetic construct
  source 1..15: mol_type = other DNA
taaagcattcttttt

SEQ ID NO: 14308 - DNA, 15 bp, synthetic construct
  source 1..15: mol_type = other DNA
ggaatctttgatgcg

SEQ ID NO: 14309 - DNA, 15 bp, synthetic construct
  source 1..15: mol_type = other DNA
actgctgtgaataat

SEQ ID NO: 14310 - DNA, 15 bp, synthetic construct
  source 1..15: mol_type = other DNA
aaaataggaaaatgc

SEQ ID NO: 14311 - DNA, 15 bp, synthetic construct
  source 1..15: mol_type = other DNA
gatctgtacacagca

SEQ ID NO: 14312 - DNA, 15 bp, synthetic construct
  source 1..15: mol_type = other DNA
caatgagaaaactgt

SEQ ID NO: 14313 - DNA, 15 bp, synthetic construct
  source 1..15: mol_type = other DNA
caaggcaaatcaact

SEQ ID NO: 14314 - DNA, 15 bp, synthetic construct
  source 1..15: mol_type = other DNA
caagagaactaattg

SEQ ID NO: 14315 - DNA, 15 bp, synthetic construct
  source 1..15: mol_type = other DNA
gctatcactgtccta

SEQ ID NO: 14316 - DNA, 15 bp, synthetic construct
  source 1..15: mol_type = other DNA
agatcaccatctgct

SEQ ID NO: 14317 - DNA, 15 bp, synthetic construct
  source 1..15: mol_type = other DNA
tgcaatactttacta

SEQ ID NO: 14318 - DNA, 15 bp, synthetic construct
  source 1..15: mol_type = other DNA
attattctacctttg

SEQ ID NO: 14319 - DNA, 15 bp, synthetic construct
  source 1..15: mol_type = other DNA
cacaatagaacagca

SEQ ID NO: 14320 - DNA, 15 bp, synthetic construct
  source 1..15: mol_type = other DNA
ggtagtcagttgatt

SEQ ID NO: 14321 - DNA, 15 bp, synthetic construct
  source 1..15: mol_type = other DNA
ttcaatctgcaaagt

SEQ ID NO: 14322 - DNA, 15 bp, synthetic construct
  source 1..15: mol_type = other DNA
atggtatatgacatt

SEQ ID NO: 14323 - DNA, 15 bp, synthetic construct
  source 1..15: mol_type = other DNA
tcaggttgcgcaaac

SEQ ID NO: 14324 - DNA, 15 bp, synthetic construct
  source 1..15: mol_type = other DNA
tggtttagaagatgc

SEQ ID NO: 14325 - DNA, 15 bp, synthetic construct
  source 1..15: mol_type = other DNA
tcattttcatcaagg

SEQ ID NO: 14326 - DNA, 15 bp, synthetic construct
  source 1..15: mol_type = other DNA
ttcctttagacttag

SEQ ID NO: 14327 - DNA, 15 bp, synthetic construct
  source 1..15: mol_type = other DNA
tagcacagaatagtc

SEQ ID NO: 14328 - DNA, 15 bp, synthetic construct
  source 1..15: mol_type = other DNA
ctgtaggtgcttcaa

SEQ ID NO: 14329 - DNA, 15 bp, synthetic construct
  source 1..15: mol_type = other DNA
ttcagagcctcaact

SEQ ID NO: 14330 - DNA, 15 bp, synthetic construct
  source 1..15: mol_type = other DNA
ggatcactgatttga

SEQ ID NO: 14331 - DNA, 15 bp, synthetic construct
  source 1..15: mol_type = other DNA
taagcactagtaata

SEQ ID NO: 14332 - DNA, 15 bp, synthetic construct
  source 1..15: mol_type = other DNA
gtagaacaatataca

SEQ ID NO: 14333 - DNA, 15 bp, synthetic construct
  source 1..15: mol_type = other DNA
ggagctcatttttca

SEQ ID NO: 14334 - DNA, 15 bp, synthetic construct
  source 1..15: mol_type = other DNA
tacttgtacccacaa

SEQ ID NO: 14335 - DNA, 15 bp, synthetic construct
  source 1..15: mol_type = other DNA
cagccgctacactag

SEQ ID NO: 14336 - DNA, 15 bp, synthetic construct
  source 1..15: mol_type = other DNA
gattctattgtgttt

SEQ ID NO: 14337 - DNA, 15 bp, synthetic construct
  source 1..15: mol_type = other DNA
tgttataaaccagta

SEQ ID NO: 14338 - DNA, 15 bp, synthetic construct
  source 1..15: mol_type = other DNA
tttgcaacaactctt

SEQ ID NO: 14339 - DNA, 15 bp, synthetic construct
  source 1..15: mol_type = other DNA
caacatgacaagata

SEQ ID NO: 14340 - DNA, 15 bp, synthetic construct
  source 1..15: mol_type = other DNA
aggaaatggagaaga

SEQ ID NO: 14341 - DNA, 15 bp, synthetic construct
  source 1..15: mol_type = other DNA
tagctttcattctat

SEQ ID NO: 14342 - DNA, 15 bp, synthetic construct
  source 1..15: mol_type = other DNA
aattagtaaaggtct

SEQ ID NO: 14343 - DNA, 15 bp, synthetic construct
  source 1..15: mol_type = other DNA
atgtagggctaaata

SEQ ID NO: 14344 - DNA, 15 bp, synthetic construct
  source 1..15: mol_type = other DNA
gttaccttcagaatg

SEQ ID NO: 14345 - DNA, 15 bp, synthetic construct
  source 1..15: mol_type = other DNA
ccctcttcttgataa

SEQ ID NO: 14346 - DNA, 15 bp, synthetic construct
  source 1..15: mol_type = other DNA
ccgttttcctgtcct

SEQ ID NO: 14347 - DNA, 15 bp, synthetic construct
  source 1..15: mol_type = other DNA
ccctcttcttgataa

SEQ ID NO: 14348 - DNA, 15 bp, synthetic construct
  source 1..15: mol_type = other DNA
ccgttttcctgtcct

SEQ ID NO: 14349 - DNA, 15 bp, synthetic construct
  source 1..15: mol_type = other DNA
gcctcacattttgct

SEQ ID NO: 14350 - DNA, 15 bp, synthetic construct
  source 1..15: mol_type = other DNA
gctcttcgaaatgag

SEQ ID NO: 14351 - DNA, 15 bp, synthetic construct
  source 1..15: mol_type = other DNA
atttgctgttttcat

SEQ ID NO: 14352 - DNA, 15 bp, synthetic construct
  source 1..15: mol_type = other DNA
gtaatgcatgccagt

SEQ ID NO: 14353 - DNA, 15 bp, synthetic construct
  source 1..15: mol_type = other DNA
taacttgaacagtga

SEQ ID NO: 14354 - DNA, 15 bp, synthetic construct
  source 1..15: mol_type = other DNA
tgactcatttgaacc

SEQ ID NO: 14355 - DNA, 15 bp, synthetic construct
  source 1..15: mol_type = other DNA
ggcatgtagaacata

SEQ ID NO: 14356 - DNA, 15 bp, synthetic construct
  source 1..15: mol_type = other DNA
ttaaaacgtttttct

SEQ ID NO: 14357 - DNA, 15 bp, synthetic construct
  source 1..15: mol_type = other DNA
acaaatggaattcat

SEQ ID NO: 14358 - DNA, 15 bp, synthetic construct
  source 1..15: mol_type = other DNA
actaaggatcataac

SEQ ID NO: 14359 - DNA, 15 bp, synthetic construct
  source 1..15: mol_type = other DNA
aaaacctactacata

SEQ ID NO: 14360 - DNA, 15 bp, synthetic construct
  source 1..15: mol_type = other DNA
tattttgcttgaagg

SEQ ID NO: 14361 - DNA, 15 bp, synthetic construct
  source 1..15: mol_type = other DNA
aagaacacttccaga

SEQ ID NO: 14362 - DNA, 15 bp, synthetic construct
  source 1..15: mol_type = other DNA
ttcaagatgccacct

SEQ ID NO: 14363 - DNA, 15 bp, synthetic construct
  source 1..15: mol_type = other DNA
tggataaggaaatca

SEQ ID NO: 14364 - DNA, 15 bp, synthetic construct
  source 1..15: mol_type = other DNA
cccaattgtctgttt

SEQ ID NO: 14365 - DNA, 15 bp, synthetic construct
  source 1..15: mol_type = other DNA
tgagtcaccaacttc

SEQ ID NO: 14366 - DNA, 15 bp, synthetic construct
  source 1..15: mol_type = other DNA
ccagatgttataggc

SEQ ID NO: 14367 - DNA, 15 bp, synthetic construct
  source 1..15: mol_type = other DNA
ggtgaattttgagca

SEQ ID NO: 14368 - DNA, 15 bp, synthetic construct
  source 1..15: mol_type = other DNA
tccaacagcatctat

SEQ ID NO: 14369 - DNA, 15 bp, synthetic construct
  source 1..15: mol_type = other DNA
aaatgctcatacctg

SEQ ID NO: 14370 - DNA, 15 bp, synthetic construct
  source 1..15: mol_type = other DNA
caatagggtataacc

SEQ ID NO: 14371 - DNA, 15 bp, synthetic construct
  source 1..15: mol_type = other DNA
aataaccacatgggg

SEQ ID NO: 14372 - DNA, 15 bp, synthetic construct
  source 1..15: mol_type = other DNA
atatctaaacacagt

SEQ ID NO: 14373 - DNA, 15 bp, synthetic construct
  source 1..15: mol_type = other DNA
agatcactttaataa

SEQ ID NO: 14374 - DNA, 15 bp, synthetic construct
  source 1..15: mol_type = other DNA
tcagacaggtagtga

SEQ ID NO: 14375 - DNA, 15 bp, synthetic construct
  source 1..15: mol_type = other DNA
gtacactattaaagt

SEQ ID NO: 14376 - DNA, 15 bp, synthetic construct
  source 1..15: mol_type = other DNA
gcacagtcagagaat

SEQ ID NO: 14377 - DNA, 15 bp, synthetic construct
  source 1..15: mol_type = other DNA
tttaatctctccacc

SEQ ID NO: 14378 - DNA, 15 bp, synthetic construct
  source 1..15: mol_type = other DNA
tgttatttcctttag

SEQ ID NO: 14379 - DNA, 15 bp, synthetic construct
  source 1..15: mol_type = other DNA
taaagaagcacttga

SEQ ID NO: 14380 - DNA, 15 bp, synthetic construct
  source 1..15: mol_type = other DNA
tctttggttgtgttt

SEQ ID NO: 14381 - DNA, 15 bp, synthetic construct
  source 1..15: mol_type = other DNA
tctttgtactagttg

SEQ ID NO: 14382 - DNA, 15 bp, synthetic construct
  source 1..15: mol_type = other DNA
agaactcgagaacag

SEQ ID NO: 14383 - DNA, 15 bp, synthetic construct
  source 1..15: mol_type = other DNA
actttcattttctcc

SEQ ID NO: 14384 - DNA, 15 bp, synthetic construct
  source 1..15: mol_type = other DNA
cttagtagaaaagga

SEQ ID NO: 14385 - DNA, 15 bp, synthetic construct
  source 1..15: mol_type = other DNA
actttcattttctcc

SEQ ID NO: 14386 - DNA, 15 bp, synthetic construct
  source 1..15: mol_type = other DNA
cttagtagaaaagga

SEQ ID NO: 14387 - DNA, 15 bp, synthetic construct
  source 1..15: mol_type = other DNA
cttcttctttggcag

SEQ ID NO: 14388 - DNA, 15 bp, synthetic construct
  source 1..15: mol_type = other DNA
cagcttatgaatgct

SEQ ID NO: 14389 - DNA, 15 bp, synthetic construct
  source 1..15: mol_type = other DNA
aataagcagcagcag

SEQ ID NO: 14390 - DNA, 15 bp, synthetic construct
  source 1..15: mol_type = other DNA
atggcaagaaaatga

SEQ ID NO: 14391 - DNA, 15 bp, synthetic construct
  source 1..15: mol_type = other DNA
atgaaacagaaacat

SEQ ID NO: 14392 - DNA, 15 bp, synthetic construct
  source 1..15: mol_type = other DNA
aaaaacaatcagcta

SEQ ID NO: 14393 - DNA, 15 bp, synthetic construct
  source 1..15: mol_type = other DNA
cactgcttgattgta

SEQ ID NO: 14394 - DNA, 15 bp, synthetic construct
  source 1..15: mol_type = other DNA
ggaacactatctttc

SEQ ID NO: 14395 - DNA, 15 bp, synthetic construct
  source 1..15: mol_type = other DNA
ctgcactttaaaaaa

SEQ ID NO: 14396 - DNA, 15 bp, synthetic construct
  source 1..15: mol_type = other DNA
tctcacaaaagacag

SEQ ID NO: 14397 - DNA, 15 bp, synthetic construct
  source 1..15: mol_type = other DNA
aattccgctacttca

SEQ ID NO: 14398 - DNA, 15 bp, synthetic construct
  source 1..15: mol_type = other DNA
tgattttgtgcattt

SEQ ID NO: 14399 - DNA, 15 bp, synthetic construct
  source 1..15: mol_type = other DNA
aacaaagaaactcgt

SEQ ID NO: 14400 - DNA, 15 bp, synthetic construct
  source 1..15: mol_type = other DNA
actattggagtgagt

SEQ ID NO: 14401 - DNA, 15 bp, synthetic construct
  source 1..15: mol_type = other DNA
atcccatgaggataa

SEQ ID NO: 14402 - DNA, 15 bp, synthetic construct
  source 1..15: mol_type = other DNA
attaggagagaggct

SEQ ID NO: 14403 - DNA, 15 bp, synthetic construct
  source 1..15: mol_type = other DNA
tggagatacagcaaa

SEQ ID NO: 14404 - DNA, 15 bp, synthetic construct
  source 1..15: mol_type = other DNA
tgaactcaagcacct

SEQ ID NO: 14405 - DNA, 15 bp, synthetic construct
  source 1..15: mol_type = other DNA
tttcatttcttctaa

SEQ ID NO: 14406 - DNA, 15 bp, synthetic construct
  source 1..15: mol_type = other DNA
tcttgtttttctgtg

SEQ ID NO: 14407 - DNA, 15 bp, synthetic construct
  source 1..15: mol_type = other DNA
ttctagatttaagta

SEQ ID NO: 14408 - DNA, 15 bp, synthetic construct
  source 1..15: mol_type = other DNA
aatacccttggaaag

SEQ ID NO: 14409 - DNA, 15 bp, synthetic construct
  source 1..15: mol_type = other DNA
ctggtacgtagcaag

SEQ ID NO: 14410 - DNA, 15 bp, synthetic construct
  source 1..15: mol_type = other DNA
cttaaaggctctaac

SEQ ID NO: 14411 - DNA, 15 bp, synthetic construct
  source 1..15: mol_type = other DNA
gagaacctctgaaat

SEQ ID NO: 14412 - DNA, 15 bp, synthetic construct
  source 1..15: mol_type = other DNA
aggatacagccagtg

SEQ ID NO: 14413 - DNA, 15 bp, synthetic construct
  source 1..15: mol_type = other DNA
cttttgtcatttatt

SEQ ID NO: 14414 - DNA, 15 bp, synthetic construct
  source 1..15: mol_type = other DNA
gctcttagcacacct

SEQ ID NO: 14415 - DNA, 15 bp, synthetic construct
  source 1..15: mol_type = other DNA
ataaattcgtgtcca

SEQ ID NO: 14416 - DNA, 15 bp, synthetic construct
  source 1..15: mol_type = other DNA
aaagaaaggccagca

SEQ ID NO: 14417 - DNA, 15 bp, synthetic construct
  source 1..15: mol_type = other DNA
gctaaaggaggttgc

SEQ ID NO: 14418 - DNA, 15 bp, synthetic construct
  source 1..15: mol_type = other DNA
aactcttcctttttc

SEQ ID NO: 14419 - DNA, 15 bp, synthetic construct
  source 1..15: mol_type = other DNA
gtcacgtttcacacc

SEQ ID NO: 14420 - DNA, 15 bp, synthetic construct
  source 1..15: mol_type = other DNA
taaggaccatggtta

SEQ ID NO: 14421 - DNA, 15 bp, synthetic construct
  source 1..15: mol_type = other DNA
gccacagtaaagatg

SEQ ID NO: 14422 - DNA, 15 bp, synthetic construct
  source 1..15: mol_type = other DNA
tgtaataagaatttt

SEQ ID NO: 14423 - DNA, 15 bp, synthetic construct
  source 1..15: mol_type = other DNA
ttagcctctttcctg

SEQ ID NO: 14424 - DNA, 15 bp, synthetic construct
  source 1..15: mol_type = other DNA
cctcctatggtactt

SEQ ID NO: 14425 - DNA, 15 bp, synthetic construct
  source 1..15: mol_type = other DNA
tcctccgtatcaggg

SEQ ID NO: 14426 - DNA, 15 bp, synthetic construct
  source 1..15: mol_type = other DNA
gaaaatccagatgta

SEQ ID NO: 14427 - DNA, 15 bp, synthetic construct
  source 1..15: mol_type = other DNA
gacacactgactttg

SEQ ID NO: 14428 - DNA, 15 bp, synthetic construct
  source 1..15: mol_type = other DNA
gcatctattgaggtc

SEQ ID NO: 14429 - DNA, 15 bp, synthetic construct
  source 1..15: mol_type = other DNA
ttcccagagatcgtg

SEQ ID NO: 14430 - DNA, 15 bp, synthetic construct
  source 1..15: mol_type = other DNA
gtggactcagtaacc

SEQ ID NO: 14431 - DNA, 15 bp, synthetic construct
  source 1..15: mol_type = other DNA
aaccttctcccctag

SEQ ID NO: 14432 - DNA, 15 bp, synthetic construct
  source 1..15: mol_type = other DNA
aagggaattctccag

SEQ ID NO: 14433 - DNA, 15 bp, synthetic construct
  source 1..15: mol_type = other DNA
gtcaagggtgacctg

SEQ ID NO: 14434 - DNA, 15 bp, synthetic construct
  source 1..15: mol_type = other DNA
acagagtcgaactgc

SEQ ID NO: 14435 - DNA, 15 bp, synthetic construct
  source 1..15: mol_type = other DNA
cgcgctgtccatgtc

SEQ ID NO: 14436 - DNA, 15 bp, synthetic construct
  source 1..15: mol_type = other DNA
gtacccaccgtccgt

SEQ ID NO: 14437 - DNA, 15 bp, synthetic construct
  source 1..15: mol_type = other DNA
ttcccgtcgaccagg

SEQ ID NO: 14438 - DNA, 15 bp, synthetic construct
  source 1..15: mol_type = other DNA
tagtaacagctactt

SEQ ID NO: 14439 - DNA, 15 bp, synthetic construct
  source 1..15: mol_type = other DNA
ttcccgtcgaccagg

SEQ ID NO: 14440 - DNA, 15 bp, synthetic construct
  source 1..15: mol_type = other DNA
tagtaacagctactt

SEQ ID NO: 14441 - DNA, 15 bp, synthetic construct
  source 1..15: mol_type = other DNA
atgcattttctctcc

SEQ ID NO: 14442 - DNA, 15 bp, synthetic construct
  source 1..15: mol_type = other DNA
cagcacctgtagttc

SEQ ID NO: 14443 - DNA, 15 bp, synthetic construct
  source 1..15: mol_type = other DNA
gttctggatcctacc

SEQ ID NO: 14444 - DNA, 15 bp, synthetic construct
  source 1..15: mol_type = other DNA
aggtttgggttttta

SEQ ID NO: 14445 - DNA, 15 bp, synthetic construct
  source 1..15: mol_type = other DNA
gtgcttatgtcttgt

SEQ ID NO: 14446 - DNA, 15 bp, synthetic construct
  source 1..15: mol_type = other DNA
ttttccagagcttca

SEQ ID NO: 14447 - DNA, 15 bp, synthetic construct
  source 1..15: mol_type = other DNA
attaaaaactttcca

SEQ ID NO: 14448 - DNA, 15 bp, synthetic construct
  source 1..15: mol_type = other DNA
cacctcatatttagc

SEQ ID NO: 14449 - DNA, 15 bp, synthetic construct
  source 1..15: mol_type = other DNA
tacattgaatgctga

SEQ ID NO: 14450 - DNA, 15 bp, synthetic construct
  source 1..15: mol_type = other DNA
ttgtaggcatgaaca

SEQ ID NO: 14451 - DNA, 15 bp, synthetic construct
  source 1..15: mol_type = other DNA
cgactgttggttgtt

SEQ ID NO: 14452 - DNA, 15 bp, synthetic construct
  source 1..15: mol_type = other DNA
aggaaagaagaatga

SEQ ID NO: 14453 - DNA, 15 bp, synthetic construct
  source 1..15: mol_type = other DNA
tctcatgaatgtatt

SEQ ID NO: 14454 - DNA, 15 bp, synthetic construct
  source 1..15: mol_type = other DNA
agttttaatctaggt

SEQ ID NO: 14455 - DNA, 15 bp, synthetic construct
  source 1..15: mol_type = other DNA
tagttgccattggaa

SEQ ID NO: 14456 - DNA, 15 bp, synthetic construct
  source 1..15: mol_type = other DNA
acatacctaatgagt

SEQ ID NO: 14457 - DNA, 15 bp, synthetic construct
  source 1..15: mol_type = other DNA
agatctgaaaaagca

SEQ ID NO: 14458 - DNA, 15 bp, synthetic construct
  source 1..15: mol_type = other DNA
ccctattgcacttct

SEQ ID NO: 14459 - DNA, 15 bp, synthetic construct
  source 1..15: mol_type = other DNA
tccagttggttggtt

SEQ ID NO: 14460 - DNA, 15 bp, synthetic construct
  source 1..15: mol_type = other DNA
tccagttggttggtt

SEQ ID NO: 14461 - DNA, 15 bp, synthetic construct
  source 1..15: mol_type = other DNA
tgtaatggaacaggt

SEQ ID NO: 14462 - DNA, 15 bp, synthetic construct
  source 1..15: mol_type = other DNA
tccactgagaagtca

SEQ ID NO: 14463 - DNA, 15 bp, synthetic construct
  source 1..15: mol_type = other DNA
gtagggagggagaaa

SEQ ID NO: 14464 - DNA, 15 bp, synthetic construct
  source 1..15: mol_type = other DNA
aaataaatccaccct

SEQ ID NO: 14465 - DNA, 15 bp, synthetic construct
  source 1..15: mol_type = other DNA
actgtcttcttacct

SEQ ID NO: 14466 - DNA, 15 bp, synthetic construct
  source 1..15: mol_type = other DNA
tctgatcagcacaag

SEQ ID NO: 14467 - DNA, 15 bp, synthetic construct
  source 1..15: mol_type = other DNA
gctggtggatgaaca

SEQ ID NO: 14468 - DNA, 15 bp, synthetic construct
  source 1..15: mol_type = other DNA
gaccactagcatgga

SEQ ID NO: 14469 - DNA, 15 bp, synthetic construct
  source 1..15: mol_type = other DNA
ctgacttgcagtttt

SEQ ID NO: 14470 - DNA, 15 bp, synthetic construct
  source 1..15: mol_type = other DNA
cctgtcacctaccac

SEQ ID NO: 14471 - DNA, 15 bp, synthetic construct
  source 1..15: mol_type = other DNA
tgacagtagttgggt

SEQ ID NO: 14472 - DNA, 15 bp, synthetic construct
  source 1..15: mol_type = other DNA
cctcacttacgtcaa

SEQ ID NO: 14473 - DNA, 15 bp, synthetic construct
  source 1..15: mol_type = other DNA
ttattacaggccaac

SEQ ID NO: 14474 - DNA, 15 bp, synthetic construct
  source 1..15: mol_type = other DNA
agtataaaatgcagt

SEQ ID NO: 14475 - DNA, 15 bp, synthetic construct
  source 1..15: mol_type = other DNA
tgagggcgcggttct

SEQ ID NO: 14476 - DNA, 15 bp, synthetic construct
  source 1..15: mol_type = other DNA
tctggcccttttaac

SEQ ID NO: 14477 - DNA, 15 bp, synthetic construct
  source 1..15: mol_type = other DNA
cttaggcggtgattc

SEQ ID NO: 14478 - DNA, 15 bp, synthetic construct
  source 1..15: mol_type = other DNA
tggatccagtccaac

SEQ ID NO: 14479 - DNA, 15 bp, synthetic construct
  source 1..15: mol_type = other DNA
aggctgtaatgtgag

SEQ ID NO: 14480 - DNA, 15 bp, synthetic construct
  source 1..15: mol_type = other DNA
gagcactgcagaaac

SEQ ID NO: 14481 - DNA, 15 bp, synthetic construct
  source 1..15: mol_type = other DNA
tgtatacatttccct

SEQ ID NO: 14482 - DNA, 15 bp, synthetic construct
  source 1..15: mol_type = other DNA
aattatgagatgctg

SEQ ID NO: 14483 - DNA, 15 bp, synthetic construct
  source 1..15: mol_type = other DNA
gtccccctgtatcct

SEQ ID NO: 14484 - DNA, 15 bp, synthetic construct
  source 1..15: mol_type = other DNA
ctcatttgtagcatt

SEQ ID NO: 14485 - DNA, 15 bp, synthetic construct
  source 1..15: mol_type = other DNA
agctttcttttgaat

SEQ ID NO: 14486 - DNA, 15 bp, synthetic construct
  source 1..15: mol_type = other DNA
cacaggtagcataac

SEQ ID NO: 14487 - DNA, 15 bp, synthetic construct
  source 1..15: mol_type = other DNA
gagttagcattcgct

SEQ ID NO: 14488 - DNA, 15 bp, synthetic construct
  source 1..15: mol_type = other DNA
ccaaggaagggtgtg

SEQ ID NO: 14489 - DNA, 15 bp, synthetic construct
  source 1..15: mol_type = other DNA
aatcctccttttgat

SEQ ID NO: 14490 - DNA, 15 bp, synthetic construct
  source 1..15: mol_type = other DNA
ctttaggcacggaac

SEQ ID NO: 14491 - DNA, 15 bp, synthetic construct
  source 1..15: mol_type = other DNA
ctattcagcctttct

SEQ ID NO: 14492 - DNA, 15 bp, synthetic construct
  source 1..15: mol_type = other DNA
aggaggtaagagcga

SEQ ID NO: 14493 - DNA, 15 bp, synthetic construct
  source 1..15: mol_type = other DNA
atgctgatctgtttt

SEQ ID NO: 14494 - DNA, 15 bp, synthetic construct
  source 1..15: mol_type = other DNA
tgtttgggcctgtgt

SEQ ID NO: 14495 - DNA, 15 bp, synthetic construct
  source 1..15: mol_type = other DNA
atggtaggccatgtg

SEQ ID NO: 14496 - DNA, 15 bp, synthetic construct
  source 1..15: mol_type = other DNA
cctggcagatctttc

SEQ ID NO: 14497 - DNA, 15 bp, synthetic construct
  source 1..15: mol_type = other DNA
aacctcccagtaaca

SEQ ID NO: 14498 - DNA, 15 bp, synthetic construct
  source 1..15: mol_type = other DNA
aagcatgcttgctac

SEQ ID NO: 14499 - DNA, 15 bp, synthetic construct
  source 1..15: mol_type = other DNA
ggtaaacactatgga

SEQ ID NO: 14500 - DNA, 15 bp, synthetic construct
  source 1..15: mol_type = other DNA
ggagtgttgaactaa

SEQ ID NO: 14501 - DNA, 15 bp, synthetic construct
  source 1..15: mol_type = other DNA
ttagggcttgctatg

SEQ ID NO: 14502 - DNA, 15 bp, synthetic construct
  source 1..15: mol_type = other DNA
ctaaataaaccaact

SEQ ID NO: 14503 - DNA, 15 bp, synthetic construct
  source 1..15: mol_type = other DNA
ctgtttttcacggaa

SEQ ID NO: 14504 - DNA, 15 bp, synthetic construct
  source 1..15: mol_type = other DNA
aaccattcacattgc

SEQ ID NO: 14505 - DNA, 15 bp, synthetic construct
  source 1..15: mol_type = other DNA
tcggaagtgaaaccc

SEQ ID NO: 14506 - DNA, 15 bp, synthetic construct
  source 1..15: mol_type = other DNA
gactacagttggtag

SEQ ID NO: 14507 - DNA, 15 bp, synthetic construct
  source 1..15: mol_type = other DNA
tacgacattgtagga

SEQ ID NO: 14508 - DNA, 15 bp, synthetic construct
  source 1..15: mol_type = other DNA
aactacggtgatcca

SEQ ID NO: 14509 - DNA, 15 bp, synthetic construct
  source 1..15: mol_type = other DNA
ttatattgtgattgc

SEQ ID NO: 14510 - DNA, 15 bp, synthetic construct
  source 1..15: mol_type = other DNA
taatgtcaactaggt

SEQ ID NO: 14511 - DNA, 15 bp, synthetic construct
  source 1..15: mol_type = other DNA
gtttttgtaaccctc

SEQ ID NO: 14512 - DNA, 15 bp, synthetic construct
  source 1..15: mol_type = other DNA
tggcaatattatccg

SEQ ID NO: 14513 - DNA, 15 bp, synthetic construct
  source 1..15: mol_type = other DNA
tacctacactgttat

SEQ ID NO: 14514 - DNA, 15 bp, synthetic construct
  source 1..15: mol_type = other DNA
aggtggttgtctaac

SEQ ID NO: 14515 - DNA, 15 bp, synthetic construct
  source 1..15: mol_type = other DNA
ctgcattctcagtgt

SEQ ID NO: 14516 - DNA, 15 bp, synthetic construct
  source 1..15: mol_type = other DNA
taatcccagttctcc

SEQ ID NO: 14517 - DNA, 15 bp, synthetic construct
  source 1..15: mol_type = other DNA
gacttcgcatgctct

SEQ ID NO: 14518 - DNA, 15 bp, synthetic construct
  source 1..15: mol_type = other DNA
tgacaggagaagcag

SEQ ID NO: 14519 - DNA, 15 bp, synthetic construct
  source 1..15: mol_type = other DNA
cctcgcgccggacag

SEQ ID NO: 14520 - DNA, 15 bp, synthetic construct
  source 1..15: mol_type = other DNA
cagccagacttcacg

SEQ ID NO: 14521 - DNA, 15 bp, synthetic construct
  source 1..15: mol_type = other DNA
gtgctggcgaaccgc

SEQ ID NO: 14522 - DNA, 15 bp, synthetic construct
  source 1..15: mol_type = other DNA
gtgcgtcgttgtcta

SEQ ID NO: 14523 - DNA, 15 bp, synthetic construct
  source 1..15: mol_type = other DNA
gcgcggtttcggtac

SEQ ID NO: 14524 - DNA, 15 bp, synthetic construct
  source 1..15: mol_type = other DNA
ggcaagttccgagtc

SEQ ID NO: 14525 - DNA, 15 bp, synthetic construct
  source 1..15: mol_type = other DNA
tggtactggaggtgg

SEQ ID NO: 14526 - DNA, 15 bp, synthetic construct
  source 1..15: mol_type = other DNA
tccatcaggagagtc

SEQ ID NO: 14527 - DNA, 15 bp, synthetic construct
  source 1..15: mol_type = other DNA
gaactcctccactac

SEQ ID NO: 14528 - DNA, 15 bp, synthetic construct
  source 1..15: mol_type = other DNA
tgctcgcgtttcaaa

SEQ ID NO: 14529 - DNA, 15 bp, synthetic construct
  source 1..15: mol_type = other DNA
agggactggataccc

SEQ ID NO: 14530 - DNA, 15 bp, synthetic construct
  source 1..15: mol_type = other DNA
tggagaagtaaggtt

SEQ ID NO: 14531 - DNA, 15 bp, synthetic construct
  source 1..15: mol_type = other DNA
agtttgtactgacgg

SEQ ID NO: 14532 - DNA, 15 bp, synthetic construct
  source 1..15: mol_type = other DNA
ctagatccactacct

SEQ ID NO: 14533 - DNA, 15 bp, synthetic construct
  source 1..15: mol_type = other DNA
gtgagcaccgatgat

SEQ ID NO: 14534 - DNA, 15 bp, synthetic construct
  source 1..15: mol_type = other DNA
accctcatagagaat

SEQ ID NO: 14535 - DNA, 15 bp, synthetic construct
  source 1..15: mol_type = other DNA
gccttcatggtagtg

SEQ ID NO: 14536 - DNA, 15 bp, synthetic construct
  source 1..15: mol_type = other DNA
gacaaggtgaccatg

SEQ ID NO: 14537 - DNA, 15 bp, synthetic construct
  source 1..15: mol_type = other DNA
aggatgacctagaag

SEQ ID NO: 14538 - DNA, 15 bp, synthetic construct
  source 1..15: mol_type = other DNA
aggcactaaggtgat

SEQ ID NO: 14539 - DNA, 15 bp, synthetic construct
  source 1..15: mol_type = other DNA
tgatgacagagacgg

SEQ ID NO: 14540 - DNA, 15 bp, synthetic construct
  source 1..15: mol_type = other DNA
ttaagaagggtgact

SEQ ID NO: 14541 - DNA, 15 bp, synthetic construct
  source 1..15: mol_type = other DNA
ttaagaagggtgact

SEQ ID NO: 14542 - DNA, 15 bp, synthetic construct
  source 1..15: mol_type = other DNA
ctaaatgtgaactgg

SEQ ID NO: 14543 - DNA, 15 bp, synthetic construct
  source 1..15: mol_type = other DNA
caggctgttctatag

SEQ ID NO: 14544 - DNA, 15 bp, synthetic construct
  source 1..15: mol_type = other DNA
tccaggtcagtgtag

SEQ ID NO: 14545 - DNA, 15 bp, synthetic construct
  source 1..15: mol_type = other DNA
accctcctaatcagt

SEQ ID NO: 14546 - DNA, 15 bp, synthetic construct
  source 1..15: mol_type = other DNA
gtcaagaccaaggta

SEQ ID NO: 14547 - DNA, 15 bp, synthetic construct
  source 1..15: mol_type = other DNA
cacagtgactcagcc

SEQ ID NO: 14548 - DNA, 15 bp, synthetic construct
  source 1..15: mol_type = other DNA
cacgggatgcaagta

SEQ ID NO: 14549 - DNA, 15 bp, synthetic construct
  source 1..15: mol_type = other DNA
tccaggtacctttac

SEQ ID NO: 14550 - DNA, 15 bp, synthetic construct
  source 1..15: mol_type = other DNA
ctcggccctgtttta

SEQ ID NO: 14551 - DNA, 15 bp, synthetic construct
  source 1..15: mol_type = other DNA
agatcctgcatgtag

SEQ ID NO: 14552 - DNA, 15 bp, synthetic construct
  source 1..15: mol_type = other DNA
agtgatttcagtagc

SEQ ID NO: 14553 - DNA, 15 bp, synthetic construct
  source 1..15: mol_type = other DNA
gtcctatctagatgt

SEQ ID NO: 14554 - DNA, 15 bp, synthetic construct
  source 1..15: mol_type = other DNA
aggttaaaagaatcc

SEQ ID NO: 14555 - DNA, 15 bp, synthetic construct
  source 1..15: mol_type = other DNA
gagataggcctattg

SEQ ID NO: 14556 - DNA, 15 bp, synthetic construct
  source 1..15: mol_type = other DNA
tagtgcacaagatgt

SEQ ID NO: 14557 - DNA, 15 bp, synthetic construct
  source 1..15: mol_type = other DNA
agtgctgaagatgtc

SEQ ID NO: 14558 - DNA, 15 bp, synthetic construct
  source 1..15: mol_type = other DNA
gaaaagttaatgcca

SEQ ID NO: 14559 - DNA, 15 bp, synthetic construct
  source 1..15: mol_type = other DNA
aggaccgatttgtat

SEQ ID NO: 14560 - DNA, 15 bp, synthetic construct
  source 1..15: mol_type = other DNA
atttatcagctgatt

SEQ ID NO: 14561 - DNA, 15 bp, synthetic construct
  source 1..15: mol_type = other DNA
ccctggatgatttaa

SEQ ID NO: 14562 - DNA, 15 bp, synthetic construct
  source 1..15: mol_type = other DNA
cattctgggcgtctc

SEQ ID NO: 14563 - DNA, 15 bp, synthetic construct
  source 1..15: mol_type = other DNA
acggtcctcattata

SEQ ID NO: 14564 - DNA, 15 bp, synthetic construct
  source 1..15: mol_type = other DNA
cttcatcctgggtaa

SEQ ID NO: 14565 - DNA, 15 bp, synthetic construct
  source 1..15: mol_type = other DNA
cttattacagagacg

SEQ ID NO: 14566 - DNA, 15 bp, synthetic construct
  source 1..15: mol_type = other DNA
caccttctttcaagg

SEQ ID NO: 14567 - DNA, 15 bp, synthetic construct
  source 1..15: mol_type = other DNA
gtcttccctgatgtg

SEQ ID NO: 14568 - DNA, 15 bp, synthetic construct
  source 1..15: mol_type = other DNA
ttcacttcatcatca

SEQ ID NO: 14569 - DNA, 15 bp, synthetic construct
  source 1..15: mol_type = other DNA
aaacaaaatctacta

SEQ ID NO: 14570 - DNA, 15 bp, synthetic construct
  source 1..15: mol_type = other DNA
gatagtgaatttcag

SEQ ID NO: 14571 - DNA, 15 bp, synthetic construct
  source 1..15: mol_type = other DNA
ccttttgagctcact

SEQ ID NO: 14572 - DNA, 15 bp, synthetic construct
  source 1..15: mol_type = other DNA
ttcaaacaccgtatc

SEQ ID NO: 14573 - DNA, 15 bp, synthetic construct
  source 1..15: mol_type = other DNA
atacagacttctatg

SEQ ID NO: 14574 - DNA, 15 bp, synthetic construct
  source 1..15: mol_type = other DNA
aagatatccatgttg

SEQ ID NO: 14575 - DNA, 15 bp, synthetic construct
  source 1..15: mol_type = other DNA
aaagtggaggacaga

SEQ ID NO: 14576 - DNA, 15 bp, synthetic construct
  source 1..15: mol_type = other DNA
tatattctccccatc

SEQ ID NO: 14577 - DNA, 15 bp, synthetic construct
  source 1..15: mol_type = other DNA
aagacagcactgttt

SEQ ID NO: 14578 - DNA, 15 bp, synthetic construct
  source 1..15: mol_type = other DNA
ccaccatcttcaact

SEQ ID NO: 14579 - DNA, 15 bp, synthetic construct
  source 1..15: mol_type = other DNA
catgaaaatatgcta

SEQ ID NO: 14580 - DNA, 15 bp, synthetic construct
  source 1..15: mol_type = other DNA
atcagagagcaacca

SEQ ID NO: 14581 - DNA, 15 bp, synthetic construct
  source 1..15: mol_type = other DNA
ttcaagaaagcacta

SEQ ID NO: 14582 - DNA, 15 bp, synthetic construct
  source 1..15: mol_type = other DNA
caagtaacctctacg

SEQ ID NO: 14583 - DNA, 15 bp, synthetic construct
  source 1..15: mol_type = other DNA
ggactccaaatttct

SEQ ID NO: 14584 - DNA, 15 bp, synthetic construct
  source 1..15: mol_type = other DNA
cttgaagagataagt

SEQ ID NO: 14585 - DNA, 15 bp, synthetic construct
  source 1..15: mol_type = other DNA
agcaggatcaacttt

SEQ ID NO: 14586 - DNA, 15 bp, synthetic construct
  source 1..15: mol_type = other DNA
tcagactgctcatgc

SEQ ID NO: 14587 - DNA, 15 bp, synthetic construct
  source 1..15: mol_type = other DNA
agtgcagttcaaccc

SEQ ID NO: 14588 - DNA, 15 bp, synthetic construct
  source 1..15: mol_type = other DNA
tacccctacaaggta

SEQ ID NO: 14589 - DNA, 15 bp, synthetic construct
  source 1..15: mol_type = other DNA
gaagctcagacaaaa

SEQ ID NO: 14590 - DNA, 15 bp, synthetic construct
  source 1..15: mol_type = other DNA
atgttatggctccaa

SEQ ID NO: 14591 - DNA, 15 bp, synthetic construct
  source 1..15: mol_type = other DNA
ttgcagttctagggg

SEQ ID NO: 14592 - DNA, 15 bp, synthetic construct
  source 1..15: mol_type = other DNA
ctatccgacacagtt

SEQ ID NO: 14593 - DNA, 15 bp, synthetic construct
  source 1..15: mol_type = other DNA
gtcttactctgatta

SEQ ID NO: 14594 - DNA, 15 bp, synthetic construct
  source 1..15: mol_type = other DNA
cgggaaaaagaattt

SEQ ID NO: 14595 - DNA, 15 bp, synthetic construct
  source 1..15: mol_type = other DNA
ggaagcatgtcaata

SEQ ID NO: 14596 - DNA, 15 bp, synthetic construct
  source 1..15: mol_type = other DNA
caaaagagccgagtg

SEQ ID NO: 14597 - DNA, 15 bp, synthetic construct
  source 1..15: mol_type = other DNA
gagttatgctggtct

SEQ ID NO: 14598 - DNA, 15 bp, synthetic construct
  source 1..15: mol_type = other DNA
gaatgacaacacgaa

SEQ ID NO: 14599 - DNA, 15 bp, synthetic construct
  source 1..15: mol_type = other DNA
atagctggaacagac

SEQ ID NO: 14600 - DNA, 15 bp, synthetic construct
  source 1..15: mol_type = other DNA
caatcggagacagag

SEQ ID NO: 14601 - DNA, 15 bp, synthetic construct
  source 1..15: mol_type = other DNA
ctggtgcttcgcatg

SEQ ID NO: 14602 - DNA, 15 bp, synthetic construct
  source 1..15: mol_type = other DNA
acagctatgagataa

SEQ ID NO: 14603 - DNA, 15 bp, synthetic construct
  source 1..15: mol_type = other DNA
ttctcacttactttc

SEQ ID NO: 14604 - DNA, 15 bp, synthetic construct
  source 1..15: mol_type = other DNA
agtccatcatcacct

SEQ ID NO: 14605 - DNA, 15 bp, synthetic construct
  source 1..15: mol_type = other DNA
actggcagcgaaagt

SEQ ID NO: 14606 - DNA, 15 bp, synthetic construct
  source 1..15: mol_type = other DNA
gaacttgtatttccc

SEQ ID NO: 14607 - DNA, 15 bp, synthetic construct
  source 1..15: mol_type = other DNA
tgctgacattattgt

SEQ ID NO: 14608 - DNA, 15 bp, synthetic construct
  source 1..15: mol_type = other DNA
ttggctggattttag

SEQ ID NO: 14609 - DNA, 15 bp, synthetic construct
  source 1..15: mol_type = other DNA
caaacattagaaatg

SEQ ID NO: 14610 - DNA, 15 bp, synthetic construct
  source 1..15: mol_type = other DNA
tgacacagggtggta

SEQ ID NO: 14611 - DNA, 15 bp, synthetic construct
  source 1..15: mol_type = other DNA
aacccaaagaacctg

SEQ ID NO: 14612 - DNA, 15 bp, synthetic construct
  source 1..15: mol_type = other DNA
ttgatttcaattgga

SEQ ID NO: 14613 - DNA, 15 bp, synthetic construct
  source 1..15: mol_type = other DNA
taaatctgtgatgtt

SEQ ID NO: 14614 - DNA, 15 bp, synthetic construct
  source 1..15: mol_type = other DNA
cattttgttgtacac

SEQ ID NO: 14615 - DNA, 15 bp, synthetic construct
  source 1..15: mol_type = other DNA
gatcgtgagtattgt

SEQ ID NO: 14616 - DNA, 15 bp, synthetic construct
  source 1..15: mol_type = other DNA
atctcctactcactg

SEQ ID NO: 14617 - DNA, 15 bp, synthetic construct
  source 1..15: mol_type = other DNA
aaatgagcagcatgg

SEQ ID NO: 14618 - DNA, 15 bp, synthetic construct
  source 1..15: mol_type = other DNA
aaccatgtagtattt

SEQ ID NO: 14619 - DNA, 15 bp, synthetic construct
  source 1..15: mol_type = other DNA
ttccacctgttctac

SEQ ID NO: 14620 - DNA, 15 bp, synthetic construct
  source 1..15: mol_type = other DNA
tgaaagtatatggag

SEQ ID NO: 14621 - DNA, 15 bp, synthetic construct
  source 1..15: mol_type = other DNA
cctatgagagaagtg

SEQ ID NO: 14622 - DNA, 15 bp, synthetic construct
  source 1..15: mol_type = other DNA
ttccagtgatcttca

SEQ ID NO: 14623 - DNA, 15 bp, synthetic construct
  source 1..15: mol_type = other DNA
gttgaaagtacacag

SEQ ID NO: 14624 - DNA, 15 bp, synthetic construct
  source 1..15: mol_type = other DNA
ttacccaagtcacct

SEQ ID NO: 14625 - DNA, 15 bp, synthetic construct
  source 1..15: mol_type = other DNA
ctaaattgcgctaca

SEQ ID NO: 14626 - DNA, 15 bp, synthetic construct
  source 1..15: mol_type = other DNA
acaaagctaaaacag

SEQ ID NO: 14627 - DNA, 15 bp, synthetic construct
  source 1..15: mol_type = other DNA
cattttatgacactt

SEQ ID NO: 14628 - DNA, 15 bp, synthetic construct
  source 1..15: mol_type = other DNA
tggtagcatcagtca

SEQ ID NO: 14629 - DNA, 15 bp, synthetic construct
  source 1..15: mol_type = other DNA
gaagtgaagactcat

SEQ ID NO: 14630 - DNA, 15 bp, synthetic construct
  source 1..15: mol_type = other DNA
accaaactcagatgt

SEQ ID NO: 14631 - DNA, 15 bp, synthetic construct
  source 1..15: mol_type = other DNA
ttagttaacactgag

SEQ ID NO: 14632 - DNA, 15 bp, synthetic construct
  source 1..15: mol_type = other DNA
tctgaactcaccttg

SEQ ID NO: 14633 - DNA, 15 bp, synthetic construct
  source 1..15: mol_type = other DNA
cttttgtgtacgaca

SEQ ID NO: 14634 - DNA, 15 bp, synthetic construct
  source 1..15: mol_type = other DNA
agccctaatatggtt

SEQ ID NO: 14635 - DNA, 15 bp, synthetic construct
  source 1..15: mol_type = other DNA
gacaagtcaaacctg

SEQ ID NO: 14636 - DNA, 15 bp, synthetic construct
  source 1..15: mol_type = other DNA
acctcctttttgtgt

SEQ ID NO: 14637 - DNA, 15 bp, synthetic construct
  source 1..15: mol_type = other DNA
ttcttataaaaacag

SEQ ID NO: 14638 - DNA, 15 bp, synthetic construct
  source 1..15: mol_type = other DNA
tcacttacggcaaag

SEQ ID NO: 14639 - DNA, 15 bp, synthetic construct
  source 1..15: mol_type = other DNA
gcatcctttacaagc

SEQ ID NO: 14640 - DNA, 15 bp, synthetic construct
  source 1..15: mol_type = other DNA
agtataggtccctga

SEQ ID NO: 14641 - DNA, 15 bp, synthetic construct
  source 1..15: mol_type = other DNA
gcatcctttacaagc

SEQ ID NO: 14642 - DNA, 15 bp, synthetic construct
  source 1..15: mol_type = other DNA
agtataggtccctga

SEQ ID NO: 14643 - DNA, 15 bp, synthetic construct
  source 1..15: mol_type = other DNA
ttctgctgctgccat

SEQ ID NO: 14644 - DNA, 15 bp, synthetic construct
  source 1..15: mol_type = other DNA
gtgggattctgcaag

SEQ ID NO: 14645 - DNA, 15 bp, synthetic construct
  source 1..15: mol_type = other DNA
gtgtacggtgaatgt

SEQ ID NO: 14646 - DNA, 15 bp, synthetic construct
  source 1..15: mol_type = other DNA
caaacagagcatccc

SEQ ID NO: 14647 - DNA, 15 bp, synthetic construct
  source 1..15: mol_type = other DNA
ctgtgtcctcattgt

SEQ ID NO: 14648 - DNA, 15 bp, synthetic construct
  source 1..15: mol_type = other DNA
aggagagtcggctaa

SEQ ID NO: 14649 - DNA, 15 bp, synthetic construct
  source 1..15: mol_type = other DNA
ctatttcaggtgata

SEQ ID NO: 14650 - DNA, 15 bp, synthetic construct
  source 1..15: mol_type = other DNA
ggctgaactttgaaa

SEQ ID NO: 14651 - DNA, 15 bp, synthetic construct
  source 1..15: mol_type = other DNA
aacatgctgtcctgg

SEQ ID NO: 14652 - DNA, 15 bp, synthetic construct
  source 1..15: mol_type = other DNA
ggtacacaactacta

SEQ ID NO: 14653 - DNA, 15 bp, synthetic construct
  source 1..15: mol_type = other DNA
tttctcttgcaaaga

SEQ ID NO: 14654 - DNA, 15 bp, synthetic construct
  source 1..15: mol_type = other DNA
caccagagaatggta

SEQ ID NO: 14655 - DNA, 15 bp, synthetic construct
  source 1..15: mol_type = other DNA
ctttctaggtcgctc

SEQ ID NO: 14656 - DNA, 15 bp, synthetic construct
  source 1..15: mol_type = other DNA
gtttgttcctcgact

SEQ ID NO: 14657 - DNA, 15 bp, synthetic construct
  source 1..15: mol_type = other DNA
tggcatgggagattg

SEQ ID NO: 14658 - DNA, 15 bp, synthetic construct
  source 1..15: mol_type = other DNA
cagcactgcaatgac

SEQ ID NO: 14659 - DNA, 15 bp, synthetic construct
  source 1..15: mol_type = other DNA
ctcaccatctgcctc

SEQ ID NO: 14660 - DNA, 15 bp, synthetic construct
  source 1..15: mol_type = other DNA
attctctatggttta

SEQ ID NO: 14661 - DNA, 15 bp, synthetic construct
  source 1..15: mol_type = other DNA
cgattttcagagtcg

SEQ ID NO: 14662 - DNA, 15 bp, synthetic construct
  source 1..15: mol_type = other DNA
atattctttgtgaag

SEQ ID NO: 14663 - DNA, 15 bp, synthetic construct
  source 1..15: mol_type = other DNA
gattcccattaaggt

SEQ ID NO: 14664 - DNA, 15 bp, synthetic construct
  source 1..15: mol_type = other DNA
actctggacacaaac

SEQ ID NO: 14665 - DNA, 15 bp, synthetic construct
  source 1..15: mol_type = other DNA
tgactggacatatcc

SEQ ID NO: 14666 - DNA, 15 bp, synthetic construct
  source 1..15: mol_type = other DNA
gtcagccaggtgtcg

SEQ ID NO: 14667 - DNA, 15 bp, synthetic construct
  source 1..15: mol_type = other DNA
cttgtccccatcatc

SEQ ID NO: 14668 - DNA, 15 bp, synthetic construct
  source 1..15: mol_type = other DNA
ctcagatgctgttgc

SEQ ID NO: 14669 - DNA, 15 bp, synthetic construct
  source 1..15: mol_type = other DNA
gaaatgagaggcaag

SEQ ID NO: 14670 - DNA, 15 bp, synthetic construct
  source 1..15: mol_type = other DNA
agtgcgagttctttc

SEQ ID NO: 14671 - DNA, 15 bp, synthetic construct
  source 1..15: mol_type = other DNA
ctaaaacgcctctag

SEQ ID NO: 14672 - DNA, 15 bp, synthetic construct
  source 1..15: mol_type = other DNA
ctccatcagaatgat

SEQ ID NO: 14673 - DNA, 15 bp, synthetic construct
  source 1..15: mol_type = other DNA
ggtgaatgctagcca

SEQ ID NO: 14674 - DNA, 15 bp, synthetic construct
  source 1..15: mol_type = other DNA
agctccagaataaag

SEQ ID NO: 14675 - DNA, 15 bp, synthetic construct
  source 1..15: mol_type = other DNA
ggtgaatgctagcca

SEQ ID NO: 14676 - DNA, 15 bp, synthetic construct
  source 1..15: mol_type = other DNA
agctccagaataaag

SEQ ID NO: 14677 - DNA, 15 bp, synthetic construct
  source 1..15: mol_type = other DNA
attgaccccatcccc

SEQ ID NO: 14678 - DNA, 15 bp, synthetic construct
  source 1..15: mol_type = other DNA
aggtttctgctgcta

SEQ ID NO: 14679 - DNA, 15 bp, synthetic construct
  source 1..15: mol_type = other DNA
gctttacacagtttg

SEQ ID NO: 14680 - DNA, 15 bp, synthetic construct
  source 1..15: mol_type = other DNA
attgcaagtgtggta

SEQ ID NO: 14681 - DNA, 15 bp, synthetic construct
  source 1..15: mol_type = other DNA
tgcagaaaactgtat

SEQ ID NO: 14682 - DNA, 15 bp, synthetic construct
  source 1..15: mol_type = other DNA
agttcacagtgaaat

SEQ ID NO: 14683 - DNA, 15 bp, synthetic construct
  source 1..15: mol_type = other DNA
tctacttttaaccag

SEQ ID NO: 14684 - DNA, 15 bp, synthetic construct
  source 1..15: mol_type = other DNA
cccctcttggcttac

SEQ ID NO: 14685 - DNA, 15 bp, synthetic construct
  source 1..15: mol_type = other DNA
aataaaagagcattg

SEQ ID NO: 14686 - DNA, 15 bp, synthetic construct
  source 1..15: mol_type = other DNA
ttgtggttgtttttg

SEQ ID NO: 14687 - DNA, 15 bp, synthetic construct
  source 1..15: mol_type = other DNA
cagtcttgtcaaaca

SEQ ID NO: 14688 - DNA, 15 bp, synthetic construct
  source 1..15: mol_type = other DNA
gacacatagggaaac

SEQ ID NO: 14689 - DNA, 15 bp, synthetic construct
  source 1..15: mol_type = other DNA
atctctcaggatggg

SEQ ID NO: 14690 - DNA, 15 bp, synthetic construct
  source 1..15: mol_type = other DNA
cagaaccccaacaag

SEQ ID NO: 14691 - DNA, 15 bp, synthetic construct
  source 1..15: mol_type = other DNA
cgtctggaaagcaaa

SEQ ID NO: 14692 - DNA, 15 bp, synthetic construct
  source 1..15: mol_type = other DNA
atgaagttggatagc

SEQ ID NO: 14693 - DNA, 15 bp, synthetic construct
  source 1..15: mol_type = other DNA
aagatatgaaagaac

SEQ ID NO: 14694 - DNA, 15 bp, synthetic construct
  source 1..15: mol_type = other DNA
gtaatttcccatggt

SEQ ID NO: 14695 - DNA, 15 bp, synthetic construct
  source 1..15: mol_type = other DNA
ttcccagaactcttc

SEQ ID NO: 14696 - DNA, 15 bp, synthetic construct
  source 1..15: mol_type = other DNA
cagttgtctctttcc

SEQ ID NO: 14697 - DNA, 15 bp, synthetic construct
  source 1..15: mol_type = other DNA
ctgctatgatatcct

SEQ ID NO: 14698 - DNA, 15 bp, synthetic construct
  source 1..15: mol_type = other DNA
gtaacagctggccta

SEQ ID NO: 14699 - DNA, 15 bp, synthetic construct
  source 1..15: mol_type = other DNA
atcttactgtgtctc

SEQ ID NO: 14700 - DNA, 15 bp, synthetic construct
  source 1..15: mol_type = other DNA
tttcgatagctctca

SEQ ID NO: 14701 - DNA, 15 bp, synthetic construct
  source 1..15: mol_type = other DNA
tgtttactgaaggag

SEQ ID NO: 14702 - DNA, 15 bp, synthetic construct
  source 1..15: mol_type = other DNA
aggcctacaaatctc

SEQ ID NO: 14703 - DNA, 15 bp, synthetic construct
  source 1..15: mol_type = other DNA
gaataaacataagca

SEQ ID NO: 14704 - DNA, 15 bp, synthetic construct
  source 1..15: mol_type = other DNA
cgcccatcacagagg

SEQ ID NO: 14705 - DNA, 15 bp, synthetic construct
  source 1..15: mol_type = other DNA
aaagtgccatttaaa

SEQ ID NO: 14706 - DNA, 15 bp, synthetic construct
  source 1..15: mol_type = other DNA
gccttaatgatctat

SEQ ID NO: 14707 - DNA, 15 bp, synthetic construct
  source 1..15: mol_type = other DNA
acaagataaagaaga

SEQ ID NO: 14708 - DNA, 15 bp, synthetic construct
  source 1..15: mol_type = other DNA
gtcttaaactgtgtc

SEQ ID NO: 14709 - DNA, 15 bp, synthetic construct
  source 1..15: mol_type = other DNA
acaagggtaaaggca

SEQ ID NO: 14710 - DNA, 15 bp, synthetic construct
  source 1..15: mol_type = other DNA
aagtaccttcctcct

SEQ ID NO: 14711 - DNA, 15 bp, synthetic construct
  source 1..15: mol_type = other DNA
ttgaagaattttggt

SEQ ID NO: 14712 - DNA, 15 bp, synthetic construct
  source 1..15: mol_type = other DNA
gtccacaacatagag

SEQ ID NO: 14713 - DNA, 15 bp, synthetic construct
  source 1..15: mol_type = other DNA
ccatttgtcctcgtg

SEQ ID NO: 14714 - DNA, 15 bp, synthetic construct
  source 1..15: mol_type = other DNA
cgttgagaatctcac

SEQ ID NO: 14715 - DNA, 15 bp, synthetic construct
  source 1..15: mol_type = other DNA
gtcagaagcctgtaa

SEQ ID NO: 14716 - DNA, 15 bp, synthetic construct
  source 1..15: mol_type = other DNA
cagccatgacctgat

SEQ ID NO: 14717 - DNA, 15 bp, synthetic construct
  source 1..15: mol_type = other DNA
gcagcattcctaagt

SEQ ID NO: 14718 - DNA, 15 bp, synthetic construct
  source 1..15: mol_type = other DNA
ccatggtgcaaacta

SEQ ID NO: 14719 - DNA, 15 bp, synthetic construct
  source 1..15: mol_type = other DNA
aagaagcacttctgc

SEQ ID NO: 14720 - DNA, 15 bp, synthetic construct
  source 1..15: mol_type = other DNA
tgttctgaaaaacat

SEQ ID NO: 14721 - DNA, 15 bp, synthetic construct
  source 1..15: mol_type = other DNA
tgcaggattttgttc

SEQ ID NO: 14722 - DNA, 15 bp, synthetic construct
  source 1..15: mol_type = other DNA
aatatcggtgtcttt

SEQ ID NO: 14723 - DNA, 15 bp, synthetic construct
  source 1..15: mol_type = other DNA
ccatgtcttctatag

SEQ ID NO: 14724 - DNA, 15 bp, synthetic construct
  source 1..15: mol_type = other DNA
ggtcttccagttctc

SEQ ID NO: 14725 - DNA, 15 bp, synthetic construct
  source 1..15: mol_type = other DNA
aatggacacaggatg

SEQ ID NO: 14726 - DNA, 15 bp, synthetic construct
  source 1..15: mol_type = other DNA
cttggagaacaaaac

SEQ ID NO: 14727 - DNA, 15 bp, synthetic construct
  source 1..15: mol_type = other DNA
agaagggtcatactt

SEQ ID NO: 14728 - DNA, 15 bp, synthetic construct
  source 1..15: mol_type = other DNA
tgggaccaattgata

SEQ ID NO: 14729 - DNA, 15 bp, synthetic construct
  source 1..15: mol_type = other DNA
ctcagaattattaaa

SEQ ID NO: 14730 - DNA, 15 bp, synthetic construct
  source 1..15: mol_type = other DNA
gtagtgagagtcaaa

SEQ ID NO: 14731 - DNA, 15 bp, synthetic construct
  source 1..15: mol_type = other DNA
gataagtgatgacgg

SEQ ID NO: 14732 - DNA, 15 bp, synthetic construct
  source 1..15: mol_type = other DNA
gccatcggttgtgtg

SEQ ID NO: 14733 - DNA, 15 bp, synthetic construct
  source 1..15: mol_type = other DNA
tgtccccaatttgat

SEQ ID NO: 14734 - DNA, 15 bp, synthetic construct
  source 1..15: mol_type = other DNA
agttttgcttttgac

SEQ ID NO: 14735 - DNA, 15 bp, synthetic construct
  source 1..15: mol_type = other DNA
caaattggaaatcct

SEQ ID NO: 14736 - DNA, 15 bp, synthetic construct
  source 1..15: mol_type = other DNA
tagaaaatatttggt

SEQ ID NO: 14737 - DNA, 15 bp, synthetic construct
  source 1..15: mol_type = other DNA
cactttttctaaagg

SEQ ID NO: 14738 - DNA, 15 bp, synthetic construct
  source 1..15: mol_type = other DNA
tcagagaagaattcg

SEQ ID NO: 14739 - DNA, 15 bp, synthetic construct
  source 1..15: mol_type = other DNA
cccatgacgaatgtc

SEQ ID NO: 14740 - DNA, 15 bp, synthetic construct
  source 1..15: mol_type = other DNA
ccattaattaatttt

SEQ ID NO: 14741 - DNA, 15 bp, synthetic construct
  source 1..15: mol_type = other DNA
ctacatgcttgaata

SEQ ID NO: 14742 - DNA, 15 bp, synthetic construct
  source 1..15: mol_type = other DNA
caaagtaacaggttg

SEQ ID NO: 14743 - DNA, 15 bp, synthetic construct
  source 1..15: mol_type = other DNA
agcttcaagtatagc

SEQ ID NO: 14744 - DNA, 15 bp, synthetic construct
  source 1..15: mol_type = other DNA
ggctaaagaaggaga

SEQ ID NO: 14745 - DNA, 15 bp, synthetic construct
  source 1..15: mol_type = other DNA
tgcctgttttagcgt

SEQ ID NO: 14746 - DNA, 15 bp, synthetic construct
  source 1..15: mol_type = other DNA
tggaactttcttttt

SEQ ID NO: 14747 - DNA, 15 bp, synthetic construct
  source 1..15: mol_type = other DNA
tttagctaccgttaa

SEQ ID NO: 14748 - DNA, 15 bp, synthetic construct
  source 1..15: mol_type = other DNA
gttgccatagataat

SEQ ID NO: 14749 - DNA, 15 bp, synthetic construct
  source 1..15: mol_type = other DNA
tgttccatagccaac

SEQ ID NO: 14750 - DNA, 15 bp, synthetic construct
  source 1..15: mol_type = other DNA
aaagaattaggtcat

SEQ ID NO: 14751 - DNA, 15 bp, synthetic construct
  source 1..15: mol_type = other DNA
tatgtctttcttcca

SEQ ID NO: 14752 - DNA, 15 bp, synthetic construct
  source 1..15: mol_type = other DNA
cattactgaggtcta

SEQ ID NO: 14753 - DNA, 15 bp, synthetic construct
  source 1..15: mol_type = other DNA
ggaaaaacaaggaat

SEQ ID NO: 14754 - DNA, 15 bp, synthetic construct
  source 1..15: mol_type = other DNA
accttgtgtgttatg

SEQ ID NO: 14755 - DNA, 15 bp, synthetic construct
  source 1..15: mol_type = other DNA
tggaatgagggcatg

SEQ ID NO: 14756 - DNA, 15 bp, synthetic construct
  source 1..15: mol_type = other DNA
tctaccctccttccc

SEQ ID NO: 14757 - DNA, 15 bp, synthetic construct
  source 1..15: mol_type = other DNA
taagatgaacatgcc

SEQ ID NO: 14758 - DNA, 15 bp, synthetic construct
  source 1..15: mol_type = other DNA
cctccagagcaatga

SEQ ID NO: 14759 - DNA, 15 bp, synthetic construct
  source 1..15: mol_type = other DNA
aaaatggtatcctca

SEQ ID NO: 14760 - DNA, 15 bp, synthetic construct
  source 1..15: mol_type = other DNA
agcaatgaaggtgaa

SEQ ID NO: 14761 - DNA, 15 bp, synthetic construct
  source 1..15: mol_type = other DNA
aaaacttaccgacac

SEQ ID NO: 14762 - DNA, 15 bp, synthetic construct
  source 1..15: mol_type = other DNA
gcaagtacaggaact

SEQ ID NO: 14763 - DNA, 15 bp, synthetic construct
  source 1..15: mol_type = other DNA
attggctgattttta

SEQ ID NO: 14764 - DNA, 15 bp, synthetic construct
  source 1..15: mol_type = other DNA
taccacttgaaacaa

SEQ ID NO: 14765 - DNA, 15 bp, synthetic construct
  source 1..15: mol_type = other DNA
tgccaacttctcagg

SEQ ID NO: 14766 - DNA, 15 bp, synthetic construct
  source 1..15: mol_type = other DNA
gccaggagtgaaccg

SEQ ID NO: 14767 - DNA, 15 bp, synthetic construct
  source 1..15: mol_type = other DNA
gtctcgaagtccttc

SEQ ID NO: 14768 - DNA, 15 bp, synthetic construct
  source 1..15: mol_type = other DNA
aatggtggatctgag

SEQ ID NO: 14769 - DNA, 15 bp, synthetic construct
  source 1..15: mol_type = other DNA
ctcgcagccctccac

SEQ ID NO: 14770 - DNA, 15 bp, synthetic construct
  source 1..15: mol_type = other DNA
cggcgtcgcttccag

SEQ ID NO: 14771 - DNA, 15 bp, synthetic construct
  source 1..15: mol_type = other DNA
gtgctggcgttgatg

SEQ ID NO: 14772 - DNA, 15 bp, synthetic construct
  source 1..15: mol_type = other DNA
tgggccaactctgtt

SEQ ID NO: 14773 - DNA, 15 bp, synthetic construct
  source 1..15: mol_type = other DNA
cgccggtagaggtga

SEQ ID NO: 14774 - DNA, 15 bp, synthetic construct
  source 1..15: mol_type = other DNA
cctctcgcttctcct

SEQ ID NO: 14775 - DNA, 15 bp, synthetic construct
  source 1..15: mol_type = other DNA
cggctgcatgcctag

SEQ ID NO: 14776 - DNA, 15 bp, synthetic construct
  source 1..15: mol_type = other DNA
aaatgcggtcggcaa

SEQ ID NO: 14777 - DNA, 15 bp, synthetic construct
  source 1..15: mol_type = other DNA
ccaatgagtggaaag

SEQ ID NO: 14778 - DNA, 15 bp, synthetic construct
  source 1..15: mol_type = other DNA
tgattaagcactcag

SEQ ID NO: 14779 - DNA, 15 bp, synthetic construct
  source 1..15: mol_type = other DNA
cagatggagaacccg

SEQ ID NO: 14780 - DNA, 15 bp, synthetic construct
  source 1..15: mol_type = other DNA
ccatgaaggcgatga

SEQ ID NO: 14781 - DNA, 15 bp, synthetic construct
  source 1..15: mol_type = other DNA
ggcatggctagcacg

SEQ ID NO: 14782 - DNA, 15 bp, synthetic construct
  source 1..15: mol_type = other DNA
aggaaggagggctga

SEQ ID NO: 14783 - DNA, 15 bp, synthetic construct
  source 1..15: mol_type = other DNA
tgctttatgtaacgt

SEQ ID NO: 14784 - DNA, 15 bp, synthetic construct
  source 1..15: mol_type = other DNA
accttgtttggaaga

SEQ ID NO: 14785 - DNA, 15 bp, synthetic construct
  source 1..15: mol_type = other DNA
gctaaaattgcttgt

SEQ ID NO: 14786 - DNA, 15 bp, synthetic construct
  source 1..15: mol_type = other DNA
cctgtgagctggaaa

SEQ ID NO: 14787 - DNA, 15 bp, synthetic construct
  source 1..15: mol_type = other DNA
gctaaaattgcttgt

SEQ ID NO: 14788 - DNA, 15 bp, synthetic construct
  source 1..15: mol_type = other DNA
cctgtgagctggaaa

SEQ ID NO: 14789 - DNA, 15 bp, synthetic construct
  source 1..15: mol_type = other DNA
acttgtgtaatgctt

SEQ ID NO: 14790 - DNA, 15 bp, synthetic construct
  source 1..15: mol_type = other DNA
ttggaagtttctaag

SEQ ID NO: 14791 - DNA, 15 bp, synthetic construct
  source 1..15: mol_type = other DNA
catttttgtttgccc

SEQ ID NO: 14792 - DNA, 15 bp, synthetic construct
  source 1..15: mol_type = other DNA
gggagggccttgatg

SEQ ID NO: 14793 - DNA, 15 bp, synthetic construct
  source 1..15: mol_type = other DNA
aaggcactttacggt

SEQ ID NO: 14794 - DNA, 15 bp, synthetic construct
  source 1..15: mol_type = other DNA
acgtgctgtgagatg

SEQ ID NO: 14795 - DNA, 15 bp, synthetic construct
  source 1..15: mol_type = other DNA
tgactgaaggtctgc

SEQ ID NO: 14796 - DNA, 15 bp, synthetic construct
  source 1..15: mol_type = other DNA
ctgcaattactacgc

SEQ ID NO: 14797 - DNA, 15 bp, synthetic construct
  source 1..15: mol_type = other DNA
acttacttgaacatc

SEQ ID NO: 14798 - DNA, 15 bp, synthetic construct
  source 1..15: mol_type = other DNA
ctctttcctggtgtt

SEQ ID NO: 14799 - DNA, 15 bp, synthetic construct
  source 1..15: mol_type = other DNA
cgagatgcagagaac

SEQ ID NO: 14800 - DNA, 15 bp, synthetic construct
  source 1..15: mol_type = other DNA
agaccattcagatcc

SEQ ID NO: 14801 - DNA, 15 bp, synthetic construct
  source 1..15: mol_type = other DNA
cacaaaagagtagcc

SEQ ID NO: 14802 - DNA, 15 bp, synthetic construct
  source 1..15: mol_type = other DNA
gggcacaatgttttc

SEQ ID NO: 14803 - DNA, 15 bp, synthetic construct
  source 1..15: mol_type = other DNA
aattttgcatttgtt

SEQ ID NO: 14804 - DNA, 15 bp, synthetic construct
  source 1..15: mol_type = other DNA
attgtcttcttcctt

SEQ ID NO: 14805 - DNA, 15 bp, synthetic construct
  source 1..15: mol_type = other DNA
ctacactgaatgaat

SEQ ID NO: 14806 - DNA, 15 bp, synthetic construct
  source 1..15: mol_type = other DNA
aggtccaagaggatt

SEQ ID NO: 14807 - DNA, 15 bp, synthetic construct
  source 1..15: mol_type = other DNA
tgtgggtcatctatt

SEQ ID NO: 14808 - DNA, 15 bp, synthetic construct
  source 1..15: mol_type = other DNA
taggatactttgtgg

SEQ ID NO: 14809 - DNA, 15 bp, synthetic construct
  source 1..15: mol_type = other DNA
aaagatcctggtcaa

SEQ ID NO: 14810 - DNA, 15 bp, synthetic construct
  source 1..15: mol_type = other DNA
gagactttatgcttg

SEQ ID NO: 14811 - DNA, 15 bp, synthetic construct
  source 1..15: mol_type = other DNA
gggtgaggaggaact

SEQ ID NO: 14812 - DNA, 15 bp, synthetic construct
  source 1..15: mol_type = other DNA
gaaattgatcaatgc

SEQ ID NO: 14813 - DNA, 15 bp, synthetic construct
  source 1..15: mol_type = other DNA
gaattccctatcaat

SEQ ID NO: 14814 - DNA, 15 bp, synthetic construct
  source 1..15: mol_type = other DNA
gaattctgtgcaaga

SEQ ID NO: 14815 - DNA, 15 bp, synthetic construct
  source 1..15: mol_type = other DNA
cagtatctcgtgcta

SEQ ID NO: 14816 - DNA, 15 bp, synthetic construct
  source 1..15: mol_type = other DNA
ggttactggagagac

SEQ ID NO: 14817 - DNA, 15 bp, synthetic construct
  source 1..15: mol_type = other DNA
cttctggccagaaaa

SEQ ID NO: 14818 - DNA, 15 bp, synthetic construct
  source 1..15: mol_type = other DNA
cttgtgcatatttaa

SEQ ID NO: 14819 - DNA, 15 bp, synthetic construct
  source 1..15: mol_type = other DNA
ttctgtcccagtcct

SEQ ID NO: 14820 - DNA, 15 bp, synthetic construct
  source 1..15: mol_type = other DNA
tcaaactgtttttct

SEQ ID NO: 14821 - DNA, 15 bp, synthetic construct
  source 1..15: mol_type = other DNA
accacatgtgtcttg

SEQ ID NO: 14822 - DNA, 15 bp, synthetic construct
  source 1..15: mol_type = other DNA
ggcattttaccctca

SEQ ID NO: 14823 - DNA, 15 bp, synthetic construct
  source 1..15: mol_type = other DNA
gctgattctgatagg

SEQ ID NO: 14824 - DNA, 15 bp, synthetic construct
  source 1..15: mol_type = other DNA
tcccttaaaggatgt

SEQ ID NO: 14825 - DNA, 15 bp, synthetic construct
  source 1..15: mol_type = other DNA
tagactcagtttgcc

SEQ ID NO: 14826 - DNA, 15 bp, synthetic construct
  source 1..15: mol_type = other DNA
ttctggtgttttgtt

SEQ ID NO: 14827 - DNA, 15 bp, synthetic construct
  source 1..15: mol_type = other DNA
acatccataagtttg

SEQ ID NO: 14828 - DNA, 15 bp, synthetic construct
  source 1..15: mol_type = other DNA
tggacaaatgtaaag

SEQ ID NO: 14829 - DNA, 15 bp, synthetic construct
  source 1..15: mol_type = other DNA
tgtgctgagatattt

SEQ ID NO: 14830 - DNA, 15 bp, synthetic construct
  source 1..15: mol_type = other DNA
gtttcaattgtttgt

SEQ ID NO: 14831 - DNA, 15 bp, synthetic construct
  source 1..15: mol_type = other DNA
gaggatctcattctg

SEQ ID NO: 14832 - DNA, 15 bp, synthetic construct
  source 1..15: mol_type = other DNA
ctttctgtagatgtc

SEQ ID NO: 14833 - DNA, 15 bp, synthetic construct
  source 1..15: mol_type = other DNA
atacctggatcacct

SEQ ID NO: 14834 - DNA, 15 bp, synthetic construct
  source 1..15: mol_type = other DNA
tttcttctctgatgt

SEQ ID NO: 14835 - DNA, 15 bp, synthetic construct
  source 1..15: mol_type = other DNA
atacctggatcacct

SEQ ID NO: 14836 - DNA, 15 bp, synthetic construct
  source 1..15: mol_type = other DNA
tttcttctctgatgt

SEQ ID NO: 14837 - DNA, 15 bp, synthetic construct
  source 1..15: mol_type = other DNA
aattggtccaatttg

SEQ ID NO: 14838 - DNA, 15 bp, synthetic construct
  source 1..15: mol_type = other DNA
ggtcctccataaata

SEQ ID NO: 14839 - DNA, 15 bp, synthetic construct
  source 1..15: mol_type = other DNA
cattgtggttccgag

SEQ ID NO: 14840 - DNA, 15 bp, synthetic construct
  source 1..15: mol_type = other DNA
cacctctgtgacact

SEQ ID NO: 14841 - DNA, 15 bp, synthetic construct
  source 1..15: mol_type = other DNA
cttcttttgtaggcg

SEQ ID NO: 14842 - DNA, 15 bp, synthetic construct
  source 1..15: mol_type = other DNA
gcattcagagcaaga

SEQ ID NO: 14843 - DNA, 15 bp, synthetic construct
  source 1..15: mol_type = other DNA
aaggtgaggcccatg

SEQ ID NO: 14844 - DNA, 15 bp, synthetic construct
  source 1..15: mol_type = other DNA
tttgtgtttcaccca

SEQ ID NO: 14845 - DNA, 15 bp, synthetic construct
  source 1..15: mol_type = other DNA
gctaagcttcacttt

SEQ ID NO: 14846 - DNA, 15 bp, synthetic construct
  source 1..15: mol_type = other DNA
acagcttactctcaa

SEQ ID NO: 14847 - DNA, 15 bp, synthetic construct
  source 1..15: mol_type = other DNA
aaaaataagcacatc

SEQ ID NO: 14848 - DNA, 15 bp, synthetic construct
  source 1..15: mol_type = other DNA
aatttgcttctctgt

SEQ ID NO: 14849 - DNA, 15 bp, synthetic construct
  source 1..15: mol_type = other DNA
tctgctggcccaaca

SEQ ID NO: 14850 - DNA, 15 bp, synthetic construct
  source 1..15: mol_type = other DNA
tgtaatcgcaatgat

SEQ ID NO: 14851 - DNA, 15 bp, synthetic construct
  source 1..15: mol_type = other DNA
ctcctcttttctcac

SEQ ID NO: 14852 - DNA, 15 bp, synthetic construct
  source 1..15: mol_type = other DNA
aggtacgattggaat

SEQ ID NO: 14853 - DNA, 15 bp, synthetic construct
  source 1..15: mol_type = other DNA
gcgtgagaaaaacgt

SEQ ID NO: 14854 - DNA, 15 bp, synthetic construct
  source 1..15: mol_type = other DNA
tcatcgtttgtcttt

SEQ ID NO: 14855 - DNA, 15 bp, synthetic construct
  source 1..15: mol_type = other DNA
acctccgtttacaac

SEQ ID NO: 14856 - DNA, 15 bp, synthetic construct
  source 1..15: mol_type = other DNA
gtgtctctgataacg

SEQ ID NO: 14857 - DNA, 15 bp, synthetic construct
  source 1..15: mol_type = other DNA
acactgtaaaatgca

SEQ ID NO: 14858 - DNA, 15 bp, synthetic construct
  source 1..15: mol_type = other DNA
aaggctttgttctta

SEQ ID NO: 14859 - DNA, 15 bp, synthetic construct
  source 1..15: mol_type = other DNA
cgcaagtcgaaataa

SEQ ID NO: 14860 - DNA, 15 bp, synthetic construct
  source 1..15: mol_type = other DNA
catctagaaaatcaa

SEQ ID NO: 14861 - DNA, 15 bp, synthetic construct
  source 1..15: mol_type = other DNA
tattttgttccattg

SEQ ID NO: 14862 - DNA, 15 bp, synthetic construct
  source 1..15: mol_type = other DNA
ggtaacatcatatca

SEQ ID NO: 14863 - DNA, 15 bp, synthetic construct
  source 1..15: mol_type = other DNA
acttctgatatgtac

SEQ ID NO: 14864 - DNA, 15 bp, synthetic construct
  source 1..15: mol_type = other DNA
ttagttattactctc

SEQ ID NO: 14865 - DNA, 15 bp, synthetic construct
  source 1..15: mol_type = other DNA
gagtgaaatcccttt

SEQ ID NO: 14866 - DNA, 15 bp, synthetic construct
  source 1..15: mol_type = other DNA
cagccttgccttttt

SEQ ID NO: 14867 - DNA, 15 bp, synthetic construct
  source 1..15: mol_type = other DNA
acgccctaactctgc

SEQ ID NO: 14868 - DNA, 15 bp, synthetic construct
  source 1..15: mol_type = other DNA
gagggtaaaaacacc

SEQ ID NO: 14869 - DNA, 15 bp, synthetic construct
  source 1..15: mol_type = other DNA
cattctctgaagatt

SEQ ID NO: 14870 - DNA, 15 bp, synthetic construct
  source 1..15: mol_type = other DNA
ctggtacatctctgc

SEQ ID NO: 14871 - DNA, 15 bp, synthetic construct
  source 1..15: mol_type = other DNA
gagggaactcacttg

SEQ ID NO: 14872 - DNA, 15 bp, synthetic construct
  source 1..15: mol_type = other DNA
ttaggagaatgagtt

SEQ ID NO: 14873 - DNA, 15 bp, synthetic construct
  source 1..15: mol_type = other DNA
tatctaacattcgtg

SEQ ID NO: 14874 - DNA, 15 bp, synthetic construct
  source 1..15: mol_type = other DNA
ctacgttccctttgg

SEQ ID NO: 14875 - DNA, 15 bp, synthetic construct
  source 1..15: mol_type = other DNA
aaagctaccttttgg

SEQ ID NO: 14876 - DNA, 15 bp, synthetic construct
  source 1..15: mol_type = other DNA
ggcttatccccttcc

SEQ ID NO: 14877 - DNA, 15 bp, synthetic construct
  source 1..15: mol_type = other DNA
tacataacaaatgca

SEQ ID NO: 14878 - DNA, 15 bp, synthetic construct
  source 1..15: mol_type = other DNA
agaaaagggtgaagc

SEQ ID NO: 14879 - DNA, 15 bp, synthetic construct
  source 1..15: mol_type = other DNA
ctcttactcacaatt

SEQ ID NO: 14880 - DNA, 15 bp, synthetic construct
  source 1..15: mol_type = other DNA
aaaatgaaatctatt

SEQ ID NO: 14881 - DNA, 15 bp, synthetic construct
  source 1..15: mol_type = other DNA
tcacaatagtgccag

SEQ ID NO: 14882 - DNA, 15 bp, synthetic construct
  source 1..15: mol_type = other DNA
ttatttattaaatac

SEQ ID NO: 14883 - DNA, 15 bp, synthetic construct
  source 1..15: mol_type = other DNA
tcacaatagtgccag

SEQ ID NO: 14884 - DNA, 15 bp, synthetic construct
  source 1..15: mol_type = other DNA
ttatttattaaatac

SEQ ID NO: 14885 - DNA, 15 bp, synthetic construct
  source 1..15: mol_type = other DNA
ctgtgaatctgcgat

SEQ ID NO: 14886 - DNA, 15 bp, synthetic construct
  source 1..15: mol_type = other DNA
ctatcatttttaggt

SEQ ID NO: 14887 - DNA, 15 bp, synthetic construct
  source 1..15: mol_type = other DNA
aaaaatgataggcag

SEQ ID NO: 14888 - DNA, 15 bp, synthetic construct
  source 1..15: mol_type = other DNA
tgcagcatataacaa

SEQ ID NO: 14889 - DNA, 15 bp, synthetic construct
  source 1..15: mol_type = other DNA
aaactgagttttgac

SEQ ID NO: 14890 - DNA, 15 bp, synthetic construct
  source 1..15: mol_type = other DNA
acctctctctgcaat

SEQ ID NO: 14891 - DNA, 15 bp, synthetic construct
  source 1..15: mol_type = other DNA
aggaaaacactaact

SEQ ID NO: 14892 - DNA, 15 bp, synthetic construct
  source 1..15: mol_type = other DNA
gtagaatgactttga

SEQ ID NO: 14893 - DNA, 15 bp, synthetic construct
  source 1..15: mol_type = other DNA
ctaatgccaaagaac

SEQ ID NO: 14894 - DNA, 15 bp, synthetic construct
  source 1..15: mol_type = other DNA
aaatatttcacaaat

SEQ ID NO: 14895 - DNA, 15 bp, synthetic construct
  source 1..15: mol_type = other DNA
gtccaaattaagagc

SEQ ID NO: 14896 - DNA, 15 bp, synthetic construct
  source 1..15: mol_type = other DNA
cattatgaacatgtg

SEQ ID NO: 14897 - DNA, 15 bp, synthetic construct
  source 1..15: mol_type = other DNA
tgagttcagatgcga

SEQ ID NO: 14898 - DNA, 15 bp, synthetic construct
  source 1..15: mol_type = other DNA
ctagtcctgtaacac

SEQ ID NO: 14899 - DNA, 15 bp, synthetic construct
  source 1..15: mol_type = other DNA
tttaaagagaatgtg

SEQ ID NO: 14900 - DNA, 15 bp, synthetic construct
  source 1..15: mol_type = other DNA
ttccatttccttttc

SEQ ID NO: 14901 - DNA, 15 bp, synthetic construct
  source 1..15: mol_type = other DNA
gaaaagagagaagtc

SEQ ID NO: 14902 - DNA, 15 bp, synthetic construct
  source 1..15: mol_type = other DNA
caaatgaagggtagg

SEQ ID NO: 14903 - DNA, 15 bp, synthetic construct
  source 1..15: mol_type = other DNA
ggagggtctcggttc

SEQ ID NO: 14904 - DNA, 15 bp, synthetic construct
  source 1..15: mol_type = other DNA
ctgacacgcttttac

SEQ ID NO: 14905 - DNA, 15 bp, synthetic construct
  source 1..15: mol_type = other DNA
ggagggtctcggttc

SEQ ID NO: 14906 - DNA, 15 bp, synthetic construct
  source 1..15: mol_type = other DNA
ctgacacgcttttac

SEQ ID NO: 14907 - DNA, 15 bp, synthetic construct
  source 1..15: mol_type = other DNA
actaaggagctcagc

SEQ ID NO: 14908 - DNA, 15 bp, synthetic construct
  source 1..15: mol_type = other DNA
gaaccaggactacct

SEQ ID NO: 14909 - DNA, 15 bp, synthetic construct
  source 1..15: mol_type = other DNA
gtactcactcttgtc

SEQ ID NO: 14910 - DNA, 15 bp, synthetic construct
  source 1..15: mol_type = other DNA
ttctgtagggtgaaa

SEQ ID NO: 14911 - DNA, 15 bp, synthetic construct
  source 1..15: mol_type = other DNA
gtactcactcttgtc

SEQ ID NO: 14912 - DNA, 15 bp, synthetic construct
  source 1..15: mol_type = other DNA
ttctgtagggtgaaa

SEQ ID NO: 14913 - DNA, 15 bp, synthetic construct
  source 1..15: mol_type = other DNA
cagaatagaaatgcc

SEQ ID NO: 14914 - DNA, 15 bp, synthetic construct
  source 1..15: mol_type = other DNA
tcctctgttctttac

SEQ ID NO: 14915 - DNA, 15 bp, synthetic construct
  source 1..15: mol_type = other DNA
tttcacctgaattgc

SEQ ID NO: 14916 - DNA, 15 bp, synthetic construct
  source 1..15: mol_type = other DNA
cataaacaagtcaag

SEQ ID NO: 14917 - DNA, 15 bp, synthetic construct
  source 1..15: mol_type = other DNA
ctctccagtacccat

SEQ ID NO: 14918 - DNA, 15 bp, synthetic construct
  source 1..15: mol_type = other DNA
cttctgctccacgag

SEQ ID NO: 14919 - DNA, 15 bp, synthetic construct
  source 1..15: mol_type = other DNA
gggaactcaccttcg

SEQ ID NO: 14920 - DNA, 15 bp, synthetic construct
  source 1..15: mol_type = other DNA
caggtctccgcttgg

SEQ ID NO: 14921 - DNA, 15 bp, synthetic construct
  source 1..15: mol_type = other DNA
tatagctttgctagg

SEQ ID NO: 14922 - DNA, 15 bp, synthetic construct
  source 1..15: mol_type = other DNA
atagacaaaaacagc

SEQ ID NO: 14923 - DNA, 15 bp, synthetic construct
  source 1..15: mol_type = other DNA
gtttttgtctatgtc

SEQ ID NO: 14924 - DNA, 15 bp, synthetic construct
  source 1..15: mol_type = other DNA
tccctttggtttctt

SEQ ID NO: 14925 - DNA, 15 bp, synthetic construct
  source 1..15: mol_type = other DNA
caagagagatgaaaa

SEQ ID NO: 14926 - DNA, 15 bp, synthetic construct
  source 1..15: mol_type = other DNA
gttctaagtgagtgc

SEQ ID NO: 14927 - DNA, 15 bp, synthetic construct
  source 1..15: mol_type = other DNA
gacgcatagtgttaa

SEQ ID NO: 14928 - DNA, 15 bp, synthetic construct
  source 1..15: mol_type = other DNA
gcaggtaatgcagta

SEQ ID NO: 14929 - DNA, 15 bp, synthetic construct
  source 1..15: mol_type = other DNA
ataaggagaaaatat

SEQ ID NO: 14930 - DNA, 15 bp, synthetic construct
  source 1..15: mol_type = other DNA
atgatgaccctccga

SEQ ID NO: 14931 - DNA, 15 bp, synthetic construct
  source 1..15: mol_type = other DNA
tgaatatactgagct

SEQ ID NO: 14932 - DNA, 15 bp, synthetic construct
  source 1..15: mol_type = other DNA
aatttgggacgggct

SEQ ID NO: 14933 - DNA, 15 bp, synthetic construct
  source 1..15: mol_type = other DNA
caaattttgttaata

SEQ ID NO: 14934 - DNA, 15 bp, synthetic construct
  source 1..15: mol_type = other DNA
tagtaaatgagcttc

SEQ ID NO: 14935 - DNA, 15 bp, synthetic construct
  source 1..15: mol_type = other DNA
atttcctccctccac

SEQ ID NO: 14936 - DNA, 15 bp, synthetic construct
  source 1..15: mol_type = other DNA
tgctatgtttttctc

SEQ ID NO: 14937 - DNA, 15 bp, synthetic construct
  source 1..15: mol_type = other DNA
tgcctcagaaattga

SEQ ID NO: 14938 - DNA, 15 bp, synthetic construct
  source 1..15: mol_type = other DNA
tctatctccctaggc

SEQ ID NO: 14939 - DNA, 15 bp, synthetic construct
  source 1..15: mol_type = other DNA
gtggcctatacagtg

SEQ ID NO: 14940 - DNA, 15 bp, synthetic construct
  source 1..15: mol_type = other DNA
aacaccttacctctg

SEQ ID NO: 14941 - DNA, 15 bp, synthetic construct
  source 1..15: mol_type = other DNA
tggctattttgacct

SEQ ID NO: 14942 - DNA, 15 bp, synthetic construct
  source 1..15: mol_type = other DNA
tttaacttcctacct

SEQ ID NO: 14943 - DNA, 15 bp, synthetic construct
  source 1..15: mol_type = other DNA
ctagtatttaggaag

SEQ ID NO: 14944 - DNA, 15 bp, synthetic construct
  source 1..15: mol_type = other DNA
tgaggacctccacag

SEQ ID NO: 14945 - DNA, 15 bp, synthetic construct
  source 1..15: mol_type = other DNA
agctttccttttcaa

SEQ ID NO: 14946 - DNA, 15 bp, synthetic construct
  source 1..15: mol_type = other DNA
tcttctcaattccaa

SEQ ID NO: 14947 - DNA, 15 bp, synthetic construct
  source 1..15: mol_type = other DNA
gctgagcggacttaa

SEQ ID NO: 14948 - DNA, 15 bp, synthetic construct
  source 1..15: mol_type = other DNA
aatcctgagttgtcc

SEQ ID NO: 14949 - DNA, 15 bp, synthetic construct
  source 1..15: mol_type = other DNA
atagtcccttgtagc

SEQ ID NO: 14950 - DNA, 15 bp, synthetic construct
  source 1..15: mol_type = other DNA
ggccctgagaagagc

SEQ ID NO: 14951 - DNA, 15 bp, synthetic construct
  source 1..15: mol_type = other DNA
gttactaaagtttcc

SEQ ID NO: 14952 - DNA, 15 bp, synthetic construct
  source 1..15: mol_type = other DNA
gaaggaagggatggc

SEQ ID NO: 14953 - DNA, 15 bp, synthetic construct
  source 1..15: mol_type = other DNA
ggagaacacaagtaa

SEQ ID NO: 14954 - DNA, 15 bp, synthetic construct
  source 1..15: mol_type = other DNA
tttcatcccttttag

SEQ ID NO: 14955 - DNA, 15 bp, synthetic construct
  source 1..15: mol_type = other DNA
gccagaatataccca

SEQ ID NO: 14956 - DNA, 15 bp, synthetic construct
  source 1..15: mol_type = other DNA
ggattaaaggagaga

SEQ ID NO: 14957 - DNA, 15 bp, synthetic construct
  source 1..15: mol_type = other DNA
gatggctatcactgc

SEQ ID NO: 14958 - DNA, 15 bp, synthetic construct
  source 1..15: mol_type = other DNA
gaccatcttgaagtg

SEQ ID NO: 14959 - DNA, 15 bp, synthetic construct
  source 1..15: mol_type = other DNA
aaaatgcttaaaaaa

SEQ ID NO: 14960 - DNA, 15 bp, synthetic construct
  source 1..15: mol_type = other DNA
actggtactggaaaa

SEQ ID NO: 14961 - DNA, 15 bp, synthetic construct
  source 1..15: mol_type = other DNA
ctctctatctccttc

SEQ ID NO: 14962 - DNA, 15 bp, synthetic construct
  source 1..15: mol_type = other DNA
ttccttgctttcatc

SEQ ID NO: 14963 - DNA, 15 bp, synthetic construct
  source 1..15: mol_type = other DNA
ctgtaccatgtagtt

SEQ ID NO: 14964 - DNA, 15 bp, synthetic construct
  source 1..15: mol_type = other DNA
tgctcatatacagtg

SEQ ID NO: 14965 - DNA, 15 bp, synthetic construct
  source 1..15: mol_type = other DNA
gatataggcatagct

SEQ ID NO: 14966 - DNA, 15 bp, synthetic construct
  source 1..15: mol_type = other DNA
gatctcactgcttaa

SEQ ID NO: 14967 - DNA, 15 bp, synthetic construct
  source 1..15: mol_type = other DNA
ttccccacaatcagg

SEQ ID NO: 14968 - DNA, 15 bp, synthetic construct
  source 1..15: mol_type = other DNA
ccttaaagggcaatg

SEQ ID NO: 14969 - DNA, 15 bp, synthetic construct
  source 1..15: mol_type = other DNA
ataaggaagcagtct

SEQ ID NO: 14970 - DNA, 15 bp, synthetic construct
  source 1..15: mol_type = other DNA
tcaattccagtatcc

SEQ ID NO: 14971 - DNA, 15 bp, synthetic construct
  source 1..15: mol_type = other DNA
catccaggtacagca

SEQ ID NO: 14972 - DNA, 15 bp, synthetic construct
  source 1..15: mol_type = other DNA
aagaataagaactgc

SEQ ID NO: 14973 - DNA, 15 bp, synthetic construct
  source 1..15: mol_type = other DNA
aagtccacatagagc

SEQ ID NO: 14974 - DNA, 15 bp, synthetic construct
  source 1..15: mol_type = other DNA
gggctagccattgag

SEQ ID NO: 14975 - DNA, 15 bp, synthetic construct
  source 1..15: mol_type = other DNA
ttgaggtaacgatcg

SEQ ID NO: 14976 - DNA, 15 bp, synthetic construct
  source 1..15: mol_type = other DNA
atcacacgactactg

SEQ ID NO: 14977 - DNA, 15 bp, synthetic construct
  source 1..15: mol_type = other DNA
ttcccaccgtgtcac

SEQ ID NO: 14978 - DNA, 15 bp, synthetic construct
  source 1..15: mol_type = other DNA
tttcgtttcctcttt

SEQ ID NO: 14979 - DNA, 15 bp, synthetic construct
  source 1..15: mol_type = other DNA
atacggtggaagccc

SEQ ID NO: 14980 - DNA, 15 bp, synthetic construct
  source 1..15: mol_type = other DNA
gagctatctcttgac

SEQ ID NO: 14981 - DNA, 15 bp, synthetic construct
  source 1..15: mol_type = other DNA
ttggaggtaagcagc

SEQ ID NO: 14982 - DNA, 15 bp, synthetic construct
  source 1..15: mol_type = other DNA
ccggcttcagtctgg

SEQ ID NO: 14983 - DNA, 15 bp, synthetic construct
  source 1..15: mol_type = other DNA
ctcaagaccagtgct

SEQ ID NO: 14984 - DNA, 15 bp, synthetic construct
  source 1..15: mol_type = other DNA
gctagtttgatacct

SEQ ID NO: 14985 - DNA, 15 bp, synthetic construct
  source 1..15: mol_type = other DNA
gtcgcctcgaagtcc

SEQ ID NO: 14986 - DNA, 15 bp, synthetic construct
  source 1..15: mol_type = other DNA
ctctatttctcccta

SEQ ID NO: 14987 - DNA, 15 bp, synthetic construct
  source 1..15: mol_type = other DNA
ttacaagtgtcccta

SEQ ID NO: 14988 - DNA, 15 bp, synthetic construct
  source 1..15: mol_type = other DNA
cagaactcggtcctt

SEQ ID NO: 14989 - DNA, 15 bp, synthetic construct
  source 1..15: mol_type = other DNA
tttgagctcctggcg

SEQ ID NO: 14990 - DNA, 15 bp, synthetic construct
  source 1..15: mol_type = other DNA
ccatctcacactttt

SEQ ID NO: 14991 - DNA, 15 bp, synthetic construct
  source 1..15: mol_type = other DNA
ggacggcttcctagg

SEQ ID NO: 14992 - DNA, 15 bp, synthetic construct
  source 1..15: mol_type = other DNA
actgcttcaaggaga

SEQ ID NO: 14993 - DNA, 15 bp, synthetic construct
  source 1..15: mol_type = other DNA
gcgcgtaccactccc

SEQ ID NO: 14994 - DNA, 15 bp, synthetic construct
  source 1..15: mol_type = other DNA
tccgtgagctctaca

SEQ ID NO: 14995 - DNA, 15 bp, synthetic construct
  source 1..15: mol_type = other DNA
ctccacgtaatgcgc

SEQ ID NO: 14996 - DNA, 15 bp, synthetic construct
  source 1..15: mol_type = other DNA
tcgtttggctttacg

SEQ ID NO: 14997 - DNA, 15 bp, synthetic construct
  source 1..15: mol_type = other DNA
gtacgctctcgttct

SEQ ID NO: 14998 - DNA, 15 bp, synthetic construct
  source 1..15: mol_type = other DNA
ggaggaggttaggaa

SEQ ID NO: 14999 - DNA, 15 bp, synthetic construct
  source 1..15: mol_type = other DNA
gacagcgatagtggc

SEQ ID NO: 15000 - DNA, 15 bp, synthetic construct
  source 1..15: mol_type = other DNA
aaaatgcgcggagaa

SEQ ID NO: 15001 - DNA, 15 bp, synthetic construct
  source 1..15: mol_type = other DNA
ctccggacgcactac

SEQ ID NO: 15002 - DNA, 15 bp, synthetic construct
  source 1..15: mol_type = other DNA
ttccggccactagta

SEQ ID NO: 15003 - DNA, 15 bp, synthetic construct
  source 1..15: mol_type = other DNA
ggtaatgggaaagga

SEQ ID NO: 15004 - DNA, 15 bp, synthetic construct
  source 1..15: mol_type = other DNA
acactagaaagctaa

SEQ ID NO: 15005 - DNA, 15 bp, synthetic construct
  source 1..15: mol_type = other DNA
aaacaacctcttacg

SEQ ID NO: 15006 - DNA, 15 bp, synthetic construct
  source 1..15: mol_type = other DNA
tctgattcctcctac

SEQ ID NO: 15007 - DNA, 15 bp, synthetic construct
  source 1..15: mol_type = other DNA
ttgtttctgattgga

SEQ ID NO: 15008 - DNA, 15 bp, synthetic construct
  source 1..15: mol_type = other DNA
ccagtaagtcctaag

SEQ ID NO: 15009 - DNA, 15 bp, synthetic construct
  source 1..15: mol_type = other DNA
tttaggtttagttat

SEQ ID NO: 15010 - DNA, 15 bp, synthetic construct
  source 1..15: mol_type = other DNA
acaagacccctagca

SEQ ID NO: 15011 - DNA, 15 bp, synthetic construct
  source 1..15: mol_type = other DNA
cacacaacaatcaga

SEQ ID NO: 15012 - DNA, 15 bp, synthetic construct
  source 1..15: mol_type = other DNA
ctatgaataaagtcc

SEQ ID NO: 15013 - DNA, 15 bp, synthetic construct
  source 1..15: mol_type = other DNA
tgagctggaactatg

SEQ ID NO: 15014 - DNA, 15 bp, synthetic construct
  source 1..15: mol_type = other DNA
aagaggaaaggcttg

SEQ ID NO: 15015 - DNA, 15 bp, synthetic construct
  source 1..15: mol_type = other DNA
tgagctggaactatg

SEQ ID NO: 15016 - DNA, 15 bp, synthetic construct
  source 1..15: mol_type = other DNA
aagaggaaaggcttg

SEQ ID NO: 15017 - DNA, 15 bp, synthetic construct
  source 1..15: mol_type = other DNA
ggtttcaagggaatc

SEQ ID NO: 15018 - DNA, 15 bp, synthetic construct
  source 1..15: mol_type = other DNA
atcagctgggtaaat

SEQ ID NO: 15019 - DNA, 15 bp, synthetic construct
  source 1..15: mol_type = other DNA
aggcaagttgggtag

SEQ ID NO: 15020 - DNA, 15 bp, synthetic construct
  source 1..15: mol_type = other DNA
aactcggcttttggc

SEQ ID NO: 15021 - DNA, 15 bp, synthetic construct
  source 1..15: mol_type = other DNA
cacggacttcatcga

SEQ ID NO: 15022 - DNA, 15 bp, synthetic construct
  source 1..15: mol_type = other DNA
aaagcagagttcagg

SEQ ID NO: 15023 - DNA, 15 bp, synthetic construct
  source 1..15: mol_type = other DNA
tgggtaagacgataa

SEQ ID NO: 15024 - DNA, 15 bp, synthetic construct
  source 1..15: mol_type = other DNA
tcttgcctaactata

SEQ ID NO: 15025 - DNA, 15 bp, synthetic construct
  source 1..15: mol_type = other DNA
atggaagaaaacctt

SEQ ID NO: 15026 - DNA, 15 bp, synthetic construct
  source 1..15: mol_type = other DNA
tgcaaagtcattcct

SEQ ID NO: 15027 - DNA, 15 bp, synthetic construct
  source 1..15: mol_type = other DNA
tgttaagagtttcat

SEQ ID NO: 15028 - DNA, 15 bp, synthetic construct
  source 1..15: mol_type = other DNA
cgctcctcacagcaa

SEQ ID NO: 15029 - DNA, 15 bp, synthetic construct
  source 1..15: mol_type = other DNA
ggcgagttttaataa

SEQ ID NO: 15030 - DNA, 15 bp, synthetic construct
  source 1..15: mol_type = other DNA
caagctgtagcgaag

SEQ ID NO: 15031 - DNA, 15 bp, synthetic construct
  source 1..15: mol_type = other DNA
aggatttgctcgact

SEQ ID NO: 15032 - DNA, 15 bp, synthetic construct
  source 1..15: mol_type = other DNA
aaagaaagcaaaccc

SEQ ID NO: 15033 - DNA, 15 bp, synthetic construct
  source 1..15: mol_type = other DNA
tagtggcccaaatga

SEQ ID NO: 15034 - DNA, 15 bp, synthetic construct
  source 1..15: mol_type = other DNA
tcaagagaagaaata

SEQ ID NO: 15035 - DNA, 15 bp, synthetic construct
  source 1..15: mol_type = other DNA
agtgaatgtgttctt

SEQ ID NO: 15036 - DNA, 15 bp, synthetic construct
  source 1..15: mol_type = other DNA
tcttatgagctgctg

SEQ ID NO: 15037 - DNA, 15 bp, synthetic construct
  source 1..15: mol_type = other DNA
ggtgcatgagactag

SEQ ID NO: 15038 - DNA, 15 bp, synthetic construct
  source 1..15: mol_type = other DNA
aggaagcgggattaa

SEQ ID NO: 15039 - DNA, 15 bp, synthetic construct
  source 1..15: mol_type = other DNA
gtttgactaagttga

SEQ ID NO: 15040 - DNA, 15 bp, synthetic construct
  source 1..15: mol_type = other DNA
gaagaccttttgact

SEQ ID NO: 15041 - DNA, 15 bp, synthetic construct
  source 1..15: mol_type = other DNA
attgcaagctgagtc

SEQ ID NO: 15042 - DNA, 15 bp, synthetic construct
  source 1..15: mol_type = other DNA
gaaatacattcatta

SEQ ID NO: 15043 - DNA, 15 bp, synthetic construct
  source 1..15: mol_type = other DNA
ctgagtgtccttcct

SEQ ID NO: 15044 - DNA, 15 bp, synthetic construct
  source 1..15: mol_type = other DNA
taattcacgtgttct

SEQ ID NO: 15045 - DNA, 15 bp, synthetic construct
  source 1..15: mol_type = other DNA
atctttctggtgttg

SEQ ID NO: 15046 - DNA, 15 bp, synthetic construct
  source 1..15: mol_type = other DNA
gaagctgttccactc

SEQ ID NO: 15047 - DNA, 15 bp, synthetic construct
  source 1..15: mol_type = other DNA
gggtgatgacctacc

SEQ ID NO: 15048 - DNA, 15 bp, synthetic construct
  source 1..15: mol_type = other DNA
ctgtactatgttggg

SEQ ID NO: 15049 - DNA, 15 bp, synthetic construct
  source 1..15: mol_type = other DNA
ttcatgattttactc

SEQ ID NO: 15050 - DNA, 15 bp, synthetic construct
  source 1..15: mol_type = other DNA
tttcaggtcgatctc

SEQ ID NO: 15051 - DNA, 15 bp, synthetic construct
  source 1..15: mol_type = other DNA
attcacaggatgggg

SEQ ID NO: 15052 - DNA, 15 bp, synthetic construct
  source 1..15: mol_type = other DNA
ggtttcgctgggtaa

SEQ ID NO: 15053 - DNA, 15 bp, synthetic construct
  source 1..15: mol_type = other DNA
ttacccagcgaaacc

SEQ ID NO: 15054 - DNA, 15 bp, synthetic construct
  source 1..15: mol_type = other DNA
aattcggagctgctt

SEQ ID NO: 15055 - DNA, 15 bp, synthetic construct
  source 1..15: mol_type = other DNA
gtcaagagtagctgg

SEQ ID NO: 15056 - DNA, 15 bp, synthetic construct
  source 1..15: mol_type = other DNA
ctagctgagccttgt

SEQ ID NO: 15057 - DNA, 15 bp, synthetic construct
  source 1..15: mol_type = other DNA
accttgggaacatac

SEQ ID NO: 15058 - DNA, 15 bp, synthetic construct
  source 1..15: mol_type = other DNA
attggaggtttgtat

SEQ ID NO: 15059 - DNA, 15 bp, synthetic construct
  source 1..15: mol_type = other DNA
tcttggacagagaat

SEQ ID NO: 15060 - DNA, 15 bp, synthetic construct
  source 1..15: mol_type = other DNA
caggactttcttttc

SEQ ID NO: 15061 - DNA, 15 bp, synthetic construct
  source 1..15: mol_type = other DNA
gcagatcgggtctcc

SEQ ID NO: 15062 - DNA, 15 bp, synthetic construct
  source 1..15: mol_type = other DNA
cgtaaaacatagact

SEQ ID NO: 15063 - DNA, 15 bp, synthetic construct
  source 1..15: mol_type = other DNA
aatgtaaaccggtaa

SEQ ID NO: 15064 - DNA, 15 bp, synthetic construct
  source 1..15: mol_type = other DNA
cttaagcacccccat

SEQ ID NO: 15065 - DNA, 15 bp, synthetic construct
  source 1..15: mol_type = other DNA
tacaaagcaacatcc

SEQ ID NO: 15066 - DNA, 15 bp, synthetic construct
  source 1..15: mol_type = other DNA
tttccctgaaattaa

SEQ ID NO: 15067 - DNA, 15 bp, synthetic construct
  source 1..15: mol_type = other DNA
ttgaactatcttctt

SEQ ID NO: 15068 - DNA, 15 bp, synthetic construct
  source 1..15: mol_type = other DNA
cttggctcactccac

SEQ ID NO: 15069 - DNA, 15 bp, synthetic construct
  source 1..15: mol_type = other DNA
tagatgctgaacggc

SEQ ID NO: 15070 - DNA, 15 bp, synthetic construct
  source 1..15: mol_type = other DNA
gagatcagacttgtg

SEQ ID NO: 15071 - DNA, 15 bp, synthetic construct
  source 1..15: mol_type = other DNA
attcattgttagccc

SEQ ID NO: 15072 - DNA, 15 bp, synthetic construct
  source 1..15: mol_type = other DNA
ttaatcagctatctc

SEQ ID NO: 15073 - DNA, 15 bp, synthetic construct
  source 1..15: mol_type = other DNA
acaggtacccaactg

SEQ ID NO: 15074 - DNA, 15 bp, synthetic construct
  source 1..15: mol_type = other DNA
gtccttgctttttgt

SEQ ID NO: 15075 - DNA, 15 bp, synthetic construct
  source 1..15: mol_type = other DNA
ctattcctttgtatc

SEQ ID NO: 15076 - DNA, 15 bp, synthetic construct
  source 1..15: mol_type = other DNA
gtagggagaccaatt

SEQ ID NO: 15077 - DNA, 15 bp, synthetic construct
  source 1..15: mol_type = other DNA
ctgaaatagacttga

SEQ ID NO: 15078 - DNA, 15 bp, synthetic construct
  source 1..15: mol_type = other DNA
gttggctataccttc

SEQ ID NO: 15079 - DNA, 15 bp, synthetic construct
  source 1..15: mol_type = other DNA
tacacctccaagggg

SEQ ID NO: 15080 - DNA, 15 bp, synthetic construct
  source 1..15: mol_type = other DNA
actaattctagtgtt

SEQ ID NO: 15081 - DNA, 15 bp, synthetic construct
  source 1..15: mol_type = other DNA
attgaacaaatgaga

SEQ ID NO: 15082 - DNA, 15 bp, synthetic construct
  source 1..15: mol_type = other DNA
ctaagactgagtttg

SEQ ID NO: 15083 - DNA, 15 bp, synthetic construct
  source 1..15: mol_type = other DNA
gtaacatatgtcaag

SEQ ID NO: 15084 - DNA, 15 bp, synthetic construct
  source 1..15: mol_type = other DNA
gccataaagttaaca

SEQ ID NO: 15085 - DNA, 15 bp, synthetic construct
  source 1..15: mol_type = other DNA
tagctagaatgattt

SEQ ID NO: 15086 - DNA, 15 bp, synthetic construct
  source 1..15: mol_type = other DNA
aaactgttgaccttt

SEQ ID NO: 15087 - DNA, 15 bp, synthetic construct
  source 1..15: mol_type = other DNA
tctggaaaaagagaa

SEQ ID NO: 15088 - DNA, 15 bp, synthetic construct
  source 1..15: mol_type = other DNA
tcaaggctttattgt

SEQ ID NO: 15089 - DNA, 15 bp, synthetic construct
  source 1..15: mol_type = other DNA
aacaagtagagcctt

SEQ ID NO: 15090 - DNA, 15 bp, synthetic construct
  source 1..15: mol_type = other DNA
agccttcttgattgt

SEQ ID NO: 15091 - DNA, 15 bp, synthetic construct
  source 1..15: mol_type = other DNA
aagcctagttaccca

SEQ ID NO: 15092 - DNA, 15 bp, synthetic construct
  source 1..15: mol_type = other DNA
gtgcaggaaactaaa

SEQ ID NO: 15093 - DNA, 15 bp, synthetic construct
  source 1..15: mol_type = other DNA
tttcctgttctcagg

SEQ ID NO: 15094 - DNA, 15 bp, synthetic construct
  source 1..15: mol_type = other DNA
tgcgtgcatagatcg

SEQ ID NO: 15095 - DNA, 15 bp, synthetic construct
  source 1..15: mol_type = other DNA
ttaggcgcaggaagt

SEQ ID NO: 15096 - DNA, 15 bp, synthetic construct
  source 1..15: mol_type = other DNA
agctccacaaggtct

SEQ ID NO: 15097 - DNA, 15 bp, synthetic construct
  source 1..15: mol_type = other DNA
cttggttggtcctta

SEQ ID NO: 15098 - DNA, 15 bp, synthetic construct
  source 1..15: mol_type = other DNA
aatgtctgacagata

SEQ ID NO: 15099 - DNA, 15 bp, synthetic construct
  source 1..15: mol_type = other DNA
agtttttgacatggc

SEQ ID NO: 15100 - DNA, 15 bp, synthetic construct
  source 1..15: mol_type = other DNA
catcatttctgcaat

SEQ ID NO: 15101 - DNA, 15 bp, synthetic construct
  source 1..15: mol_type = other DNA
gaaatggtatacata

SEQ ID NO: 15102 - DNA, 15 bp, synthetic construct
  source 1..15: mol_type = other DNA
aaccatttacttgaa

SEQ ID NO: 15103 - DNA, 15 bp, synthetic construct
  source 1..15: mol_type = other DNA
atacatttcttgcta

SEQ ID NO: 15104 - DNA, 15 bp, synthetic construct
  source 1..15: mol_type = other DNA
tttagtggcagaggt

SEQ ID NO: 15105 - DNA, 15 bp, synthetic construct
  source 1..15: mol_type = other DNA
caaatgatcttcttt

SEQ ID NO: 15106 - DNA, 15 bp, synthetic construct
  source 1..15: mol_type = other DNA
aatacaaggctatgg

SEQ ID NO: 15107 - DNA, 15 bp, synthetic construct
  source 1..15: mol_type = other DNA
tcttggtctattgtt

SEQ ID NO: 15108 - DNA, 15 bp, synthetic construct
  source 1..15: mol_type = other DNA
caataaagacatggc

SEQ ID NO: 15109 - DNA, 15 bp, synthetic construct
  source 1..15: mol_type = other DNA
tcttggtctattgtt

SEQ ID NO: 15110 - DNA, 15 bp, synthetic construct
  source 1..15: mol_type = other DNA
caataaagacatggc

SEQ ID NO: 15111 - DNA, 15 bp, synthetic construct
  source 1..15: mol_type = other DNA
agagtacttttgtta

SEQ ID NO: 15112 - DNA, 15 bp, synthetic construct
  source 1..15: mol_type = other DNA
taaagtattagtagt

SEQ ID NO: 15113 - DNA, 15 bp, synthetic construct
  source 1..15: mol_type = other DNA
tggtgatgagtttag

SEQ ID NO: 15114 - DNA, 15 bp, synthetic construct
  source 1..15: mol_type = other DNA
cggctaacccttaga

SEQ ID NO: 15115 - DNA, 15 bp, synthetic construct
  source 1..15: mol_type = other DNA
cttgagtttctgtcg

SEQ ID NO: 15116 - DNA, 15 bp, synthetic construct
  source 1..15: mol_type = other DNA
ggccacttctaagcc

SEQ ID NO: 15117 - DNA, 15 bp, synthetic construct
  source 1..15: mol_type = other DNA
cttggtatgtgcttc

SEQ ID NO: 15118 - DNA, 15 bp, synthetic construct
  source 1..15: mol_type = other DNA
ggccagaatttaaac

SEQ ID NO: 15119 - DNA, 15 bp, synthetic construct
  source 1..15: mol_type = other DNA
aattctttaatgtaa

SEQ ID NO: 15120 - DNA, 15 bp, synthetic construct
  source 1..15: mol_type = other DNA
tgcaattccacagag

SEQ ID NO: 15121 - DNA, 15 bp, synthetic construct
  source 1..15: mol_type = other DNA
aaatcttttcaaaca

SEQ ID NO: 15122 - DNA, 15 bp, synthetic construct
  source 1..15: mol_type = other DNA
tgtaatgttcccaaa

SEQ ID NO: 15123 - DNA, 15 bp, synthetic construct
  source 1..15: mol_type = other DNA
tcataccagatgtca

SEQ ID NO: 15124 - DNA, 15 bp, synthetic construct
  source 1..15: mol_type = other DNA
taatattctgctgct

SEQ ID NO: 15125 - DNA, 15 bp, synthetic construct
  source 1..15: mol_type = other DNA
ataggaaatgaacaa

SEQ ID NO: 15126 - DNA, 15 bp, synthetic construct
  source 1..15: mol_type = other DNA
tggttctaagaattg

SEQ ID NO: 15127 - DNA, 15 bp, synthetic construct
  source 1..15: mol_type = other DNA
tttgtgtgttctttt

SEQ ID NO: 15128 - DNA, 15 bp, synthetic construct
  source 1..15: mol_type = other DNA
caaaccaactttcta

SEQ ID NO: 15129 - DNA, 15 bp, synthetic construct
  source 1..15: mol_type = other DNA
atgaggaaagaaggg

SEQ ID NO: 15130 - DNA, 15 bp, synthetic construct
  source 1..15: mol_type = other DNA
acatgacagcttttc

SEQ ID NO: 15131 - DNA, 15 bp, synthetic construct
  source 1..15: mol_type = other DNA
tgttcatacgccttt

SEQ ID NO: 15132 - DNA, 15 bp, synthetic construct
  source 1..15: mol_type = other DNA
caggaagatgaggtt

SEQ ID NO: 15133 - DNA, 15 bp, synthetic construct
  source 1..15: mol_type = other DNA
acagcatgcagatac

SEQ ID NO: 15134 - DNA, 15 bp, synthetic construct
  source 1..15: mol_type = other DNA
atgctgcttcataag

SEQ ID NO: 15135 - DNA, 15 bp, synthetic construct
  source 1..15: mol_type = other DNA
gcgaccctgccgtaa

SEQ ID NO: 15136 - DNA, 15 bp, synthetic construct
  source 1..15: mol_type = other DNA
cttcccttccggtca

SEQ ID NO: 15137 - DNA, 15 bp, synthetic construct
  source 1..15: mol_type = other DNA
aaactaggccctgtg

SEQ ID NO: 15138 - DNA, 15 bp, synthetic construct
  source 1..15: mol_type = other DNA
ccaatcatggcaaga

SEQ ID NO: 15139 - DNA, 15 bp, synthetic construct
  source 1..15: mol_type = other DNA
tctcaagattctgcc

SEQ ID NO: 15140 - DNA, 15 bp, synthetic construct
  source 1..15: mol_type = other DNA
ccgttctgatctaaa

SEQ ID NO: 15141 - DNA, 15 bp, synthetic construct
  source 1..15: mol_type = other DNA
tagcttctcagaaaa

SEQ ID NO: 15142 - DNA, 15 bp, synthetic construct
  source 1..15: mol_type = other DNA
cttttcatggactag

SEQ ID NO: 15143 - DNA, 15 bp, synthetic construct
  source 1..15: mol_type = other DNA
ctttgcgtttgagct

SEQ ID NO: 15144 - DNA, 15 bp, synthetic construct
  source 1..15: mol_type = other DNA
tgagacctcagtacg

SEQ ID NO: 15145 - DNA, 15 bp, synthetic construct
  source 1..15: mol_type = other DNA
cagcatgcagttcaa

SEQ ID NO: 15146 - DNA, 15 bp, synthetic construct
  source 1..15: mol_type = other DNA
gtttaactctacagc

SEQ ID NO: 15147 - DNA, 15 bp, synthetic construct
  source 1..15: mol_type = other DNA
caagcttgctgaact

SEQ ID NO: 15148 - DNA, 15 bp, synthetic construct
  source 1..15: mol_type = other DNA
cctaatctggatgtg

SEQ ID NO: 15149 - DNA, 15 bp, synthetic construct
  source 1..15: mol_type = other DNA
gaatagtttagcttt

SEQ ID NO: 15150 - DNA, 15 bp, synthetic construct
  source 1..15: mol_type = other DNA
ctcctcttcttttgt

SEQ ID NO: 15151 - DNA, 15 bp, synthetic construct
  source 1..15: mol_type = other DNA
ctgtttctctacaga

SEQ ID NO: 15152 - DNA, 15 bp, synthetic construct
  source 1..15: mol_type = other DNA
gatcagctccagttt

SEQ ID NO: 15153 - DNA, 15 bp, synthetic construct
  source 1..15: mol_type = other DNA
cctccccgctgacgg

SEQ ID NO: 15154 - DNA, 15 bp, synthetic construct
  source 1..15: mol_type = other DNA
caggaactgcaccat

SEQ ID NO: 15155 - DNA, 15 bp, synthetic construct
  source 1..15: mol_type = other DNA
atgccctctgtggtc

SEQ ID NO: 15156 - DNA, 15 bp, synthetic construct
  source 1..15: mol_type = other DNA
gagctggcgcacgta

SEQ ID NO: 15157 - DNA, 15 bp, synthetic construct
  source 1..15: mol_type = other DNA
gcatcgagtacatcc

SEQ ID NO: 15158 - DNA, 15 bp, synthetic construct
  source 1..15: mol_type = other DNA
gaatgtggatgtttt

SEQ ID NO: 15159 - DNA, 15 bp, synthetic construct
  source 1..15: mol_type = other DNA
gccacagacaagtgc

SEQ ID NO: 15160 - DNA, 15 bp, synthetic construct
  source 1..15: mol_type = other DNA
gccgcccaccttgta

SEQ ID NO: 15161 - DNA, 15 bp, synthetic construct
  source 1..15: mol_type = other DNA
gtgtttgagctactg

SEQ ID NO: 15162 - DNA, 15 bp, synthetic construct
  source 1..15: mol_type = other DNA
gacggcgttgatcac

SEQ ID NO: 15163 - DNA, 15 bp, synthetic construct
  source 1..15: mol_type = other DNA
gtgtttgagctactg

SEQ ID NO: 15164 - DNA, 15 bp, synthetic construct
  source 1..15: mol_type = other DNA
gacggcgttgatcac

SEQ ID NO: 15165 - DNA, 15 bp, synthetic construct
  source 1..15: mol_type = other DNA
ggtcaccctgcttag

SEQ ID NO: 15166 - DNA, 15 bp, synthetic construct
  source 1..15: mol_type = other DNA
gcctgtgtccattga

SEQ ID NO: 15167 - DNA, 15 bp, synthetic construct
  source 1..15: mol_type = other DNA
ggtgtcccatgagtg

SEQ ID NO: 15168 - DNA, 15 bp, synthetic construct
  source 1..15: mol_type = other DNA
ggaggtgctgcttag

SEQ ID NO: 15169 - DNA, 15 bp, synthetic construct
  source 1..15: mol_type = other DNA
ctcttaggtcgctat

SEQ ID NO: 15170 - DNA, 15 bp, synthetic construct
  source 1..15: mol_type = other DNA
ttagcctcctcgaaa

SEQ ID NO: 15171 - DNA, 15 bp, synthetic construct
  source 1..15: mol_type = other DNA
gacctggaggatgcc

SEQ ID NO: 15172 - DNA, 15 bp, synthetic construct
  source 1..15: mol_type = other DNA
agcagggtctgacca

SEQ ID NO: 15173 - DNA, 15 bp, synthetic construct
  source 1..15: mol_type = other DNA
agtccttagtccacc

SEQ ID NO: 15174 - DNA, 15 bp, synthetic construct
  source 1..15: mol_type = other DNA
gacctcagtgtctgc

SEQ ID NO: 15175 - DNA, 15 bp, synthetic construct
  source 1..15: mol_type = other DNA
tggacatcccctact

SEQ ID NO: 15176 - DNA, 15 bp, synthetic construct
  source 1..15: mol_type = other DNA
caggatgctctcact

SEQ ID NO: 15177 - DNA, 15 bp, synthetic construct
  source 1..15: mol_type = other DNA
gcgagcccgtggacc

SEQ ID NO: 15178 - DNA, 15 bp, synthetic construct
  source 1..15: mol_type = other DNA
ggtagaggaggtgct

SEQ ID NO: 15179 - DNA, 15 bp, synthetic construct
  source 1..15: mol_type = other DNA
taaggccctcccaac

SEQ ID NO: 15180 - DNA, 15 bp, synthetic construct
  source 1..15: mol_type = other DNA
ggccacgatgacctc

SEQ ID NO: 15181 - DNA, 15 bp, synthetic construct
  source 1..15: mol_type = other DNA
cccgggcttgggatg

SEQ ID NO: 15182 - DNA, 15 bp, synthetic construct
  source 1..15: mol_type = other DNA
accacgtgccacgtt

SEQ ID NO: 15183 - DNA, 15 bp, synthetic construct
  source 1..15: mol_type = other DNA
gaagaagctgaactg

SEQ ID NO: 15184 - DNA, 15 bp, synthetic construct
  source 1..15: mol_type = other DNA
cgggagcatgtggag

SEQ ID NO: 15185 - DNA, 15 bp, synthetic construct
  source 1..15: mol_type = other DNA
gcgagagcctcactg

SEQ ID NO: 15186 - DNA, 15 bp, synthetic construct
  source 1..15: mol_type = other DNA
cccaacaggctggta

SEQ ID NO: 15187 - DNA, 15 bp, synthetic construct
  source 1..15: mol_type = other DNA
atcgagcgactattc

SEQ ID NO: 15188 - DNA, 15 bp, synthetic construct
  source 1..15: mol_type = other DNA
actcaccacttaaat

SEQ ID NO: 15189 - DNA, 15 bp, synthetic construct
  source 1..15: mol_type = other DNA
atcgagcgactattc

SEQ ID NO: 15190 - DNA, 15 bp, synthetic construct
  source 1..15: mol_type = other DNA
actcaccacttaaat

SEQ ID NO: 15191 - DNA, 15 bp, synthetic construct
  source 1..15: mol_type = other DNA
caacatcttcctgaa

SEQ ID NO: 15192 - DNA, 15 bp, synthetic construct
  source 1..15: mol_type = other DNA
actacttgtctgtgg

SEQ ID NO: 15193 - DNA, 15 bp, synthetic construct
  source 1..15: mol_type = other DNA
accccatgactacgt

SEQ ID NO: 15194 - DNA, 15 bp, synthetic construct
  source 1..15: mol_type = other DNA
ggtggcactaactgg

SEQ ID NO: 15195 - DNA, 15 bp, synthetic construct
  source 1..15: mol_type = other DNA
ctgccctgaaccgtg

SEQ ID NO: 15196 - DNA, 15 bp, synthetic construct
  source 1..15: mol_type = other DNA
gaggtagaagtggtc

SEQ ID NO: 15197 - DNA, 15 bp, synthetic construct
  source 1..15: mol_type = other DNA
ggcagattgaaaacc

SEQ ID NO: 15198 - DNA, 15 bp, synthetic construct
  source 1..15: mol_type = other DNA
tgtttagaagcccaa

SEQ ID NO: 15199 - DNA, 15 bp, synthetic construct
  source 1..15: mol_type = other DNA
gatccctgtctgtgc

SEQ ID NO: 15200 - DNA, 15 bp, synthetic construct
  source 1..15: mol_type = other DNA
tagcagccattatga

SEQ ID NO: 15201 - DNA, 15 bp, synthetic construct
  source 1..15: mol_type = other DNA
ccactcccgtcggtg

SEQ ID NO: 15202 - DNA, 15 bp, synthetic construct
  source 1..15: mol_type = other DNA
gttgaggaagttccc

SEQ ID NO: 15203 - DNA, 15 bp, synthetic construct
  source 1..15: mol_type = other DNA
ccagctgatcctgag

SEQ ID NO: 15204 - DNA, 15 bp, synthetic construct
  source 1..15: mol_type = other DNA
gccctcccattatgc

SEQ ID NO: 15205 - DNA, 15 bp, synthetic construct
  source 1..15: mol_type = other DNA
ccagctgatcctgag

SEQ ID NO: 15206 - DNA, 15 bp, synthetic construct
  source 1..15: mol_type = other DNA
gccctcccattatgc

SEQ ID NO: 15207 - DNA, 15 bp, synthetic construct
  source 1..15: mol_type = other DNA
ggtcatccccaggtg

SEQ ID NO: 15208 - DNA, 15 bp, synthetic construct
  source 1..15: mol_type = other DNA
tgggcagggctccgt

SEQ ID NO: 15209 - DNA, 15 bp, synthetic construct
  source 1..15: mol_type = other DNA
caggctgaccgttag

SEQ ID NO: 15210 - DNA, 15 bp, synthetic construct
  source 1..15: mol_type = other DNA
cttcttcaggttgga

SEQ ID NO: 15211 - DNA, 15 bp, synthetic construct
  source 1..15: mol_type = other DNA
tttcaggatcaacct

SEQ ID NO: 15212 - DNA, 15 bp, synthetic construct
  source 1..15: mol_type = other DNA
agctcactctatcag

SEQ ID NO: 15213 - DNA, 15 bp, synthetic construct
  source 1..15: mol_type = other DNA
acgggactgtcacgt

SEQ ID NO: 15214 - DNA, 15 bp, synthetic construct
  source 1..15: mol_type = other DNA
ttcatggtgctgaac

SEQ ID NO: 15215 - DNA, 15 bp, synthetic construct
  source 1..15: mol_type = other DNA
gccatcgagcagaag

SEQ ID NO: 15216 - DNA, 15 bp, synthetic construct
  source 1..15: mol_type = other DNA
gtcggcccgacgaaa

SEQ ID NO: 15217 - DNA, 15 bp, synthetic construct
  source 1..15: mol_type = other DNA
agcctgtctggctag

SEQ ID NO: 15218 - DNA, 15 bp, synthetic construct
  source 1..15: mol_type = other DNA
tcctctctgccttcg

SEQ ID NO: 15219 - DNA, 15 bp, synthetic construct
  source 1..15: mol_type = other DNA
tgccagtgcaggaga

SEQ ID NO: 15220 - DNA, 15 bp, synthetic construct
  source 1..15: mol_type = other DNA
ttcctgactgaggag

SEQ ID NO: 15221 - DNA, 15 bp, synthetic construct
  source 1..15: mol_type = other DNA
atccttgtctgtgct

SEQ ID NO: 15222 - DNA, 15 bp, synthetic construct
  source 1..15: mol_type = other DNA
cttaccaggctctgt

SEQ ID NO: 15223 - DNA, 15 bp, synthetic construct
  source 1..15: mol_type = other DNA
ggtgtgtgtcatcga

SEQ ID NO: 15224 - DNA, 15 bp, synthetic construct
  source 1..15: mol_type = other DNA
gtgaagtcaggagga

SEQ ID NO: 15225 - DNA, 15 bp, synthetic construct
  source 1..15: mol_type = other DNA
ttcactggtgtgtcc

SEQ ID NO: 15226 - DNA, 15 bp, synthetic construct
  source 1..15: mol_type = other DNA
ctcagtggttaggac

SEQ ID NO: 15227 - DNA, 15 bp, synthetic construct
  source 1..15: mol_type = other DNA
gaggcgttcttcctg

SEQ ID NO: 15228 - DNA, 15 bp, synthetic construct
  source 1..15: mol_type = other DNA
tcacttgtgctgtcg

SEQ ID NO: 15229 - DNA, 15 bp, synthetic construct
  source 1..15: mol_type = other DNA
cctcaagttctccag

SEQ ID NO: 15230 - DNA, 15 bp, synthetic construct
  source 1..15: mol_type = other DNA
agtcggtcaccgcat

SEQ ID NO: 15231 - DNA, 15 bp, synthetic construct
  source 1..15: mol_type = other DNA
gcactggacacatcc

SEQ ID NO: 15232 - DNA, 15 bp, synthetic construct
  source 1..15: mol_type = other DNA
ttgcagtgcccaatg

SEQ ID NO: 15233 - DNA, 15 bp, synthetic construct
  source 1..15: mol_type = other DNA
ttctgtgtgataagc

SEQ ID NO: 15234 - DNA, 15 bp, synthetic construct
  source 1..15: mol_type = other DNA
aagccaggttagtgt

SEQ ID NO: 15235 - DNA, 15 bp, synthetic construct
  source 1..15: mol_type = other DNA
ctcctaataatgtca

SEQ ID NO: 15236 - DNA, 15 bp, synthetic construct
  source 1..15: mol_type = other DNA
gcacggagttttggt

SEQ ID NO: 15237 - DNA, 15 bp, synthetic construct
  source 1..15: mol_type = other DNA
gatttcaagtcaaga

SEQ ID NO: 15238 - DNA, 15 bp, synthetic construct
  source 1..15: mol_type = other DNA
gcaccattttactgc

SEQ ID NO: 15239 - DNA, 15 bp, synthetic construct
  source 1..15: mol_type = other DNA
acctgctaaacttgc

SEQ ID NO: 15240 - DNA, 15 bp, synthetic construct
  source 1..15: mol_type = other DNA
ctgctttacttccct

SEQ ID NO: 15241 - DNA, 15 bp, synthetic construct
  source 1..15: mol_type = other DNA
taacccctggccaaa

SEQ ID NO: 15242 - DNA, 15 bp, synthetic construct
  source 1..15: mol_type = other DNA
ggctcttaacaactg

SEQ ID NO: 15243 - DNA, 15 bp, synthetic construct
  source 1..15: mol_type = other DNA
tgccggttctagtcc

SEQ ID NO: 15244 - DNA, 15 bp, synthetic construct
  source 1..15: mol_type = other DNA
ttatctgagaatcca

SEQ ID NO: 15245 - DNA, 15 bp, synthetic construct
  source 1..15: mol_type = other DNA
tcctgaacatatggt

SEQ ID NO: 15246 - DNA, 15 bp, synthetic construct
  source 1..15: mol_type = other DNA
aagcaacagtcattt

SEQ ID NO: 15247 - DNA, 15 bp, synthetic construct
  source 1..15: mol_type = other DNA
ttgaaaaacgtgagg

SEQ ID NO: 15248 - DNA, 15 bp, synthetic construct
  source 1..15: mol_type = other DNA
ccgaaggtagtaagg

SEQ ID NO: 15249 - DNA, 15 bp, synthetic construct
  source 1..15: mol_type = other DNA
aatgatatccctcac

SEQ ID NO: 15250 - DNA, 15 bp, synthetic construct
  source 1..15: mol_type = other DNA
atgccccaatcagag

SEQ ID NO: 15251 - DNA, 15 bp, synthetic construct
  source 1..15: mol_type = other DNA
gtaaatgcagtgatt

SEQ ID NO: 15252 - DNA, 15 bp, synthetic construct
  source 1..15: mol_type = other DNA
cagaagctcagttct

SEQ ID NO: 15253 - DNA, 15 bp, synthetic construct
  source 1..15: mol_type = other DNA
tggtttggccaacta

SEQ ID NO: 15254 - DNA, 15 bp, synthetic construct
  source 1..15: mol_type = other DNA
tccattgggattcac

SEQ ID NO: 15255 - DNA, 15 bp, synthetic construct
  source 1..15: mol_type = other DNA
tctgagttgcaagaa

SEQ ID NO: 15256 - DNA, 15 bp, synthetic construct
  source 1..15: mol_type = other DNA
aaaatcactgcacca

SEQ ID NO: 15257 - DNA, 15 bp, synthetic construct
  source 1..15: mol_type = other DNA
attggccaaacagcg

SEQ ID NO: 15258 - DNA, 15 bp, synthetic construct
  source 1..15: mol_type = other DNA
aggctattgcaatta

SEQ ID NO: 15259 - DNA, 15 bp, synthetic construct
  source 1..15: mol_type = other DNA
ttaaaaagctaaaag

SEQ ID NO: 15260 - DNA, 15 bp, synthetic construct
  source 1..15: mol_type = other DNA
gtgggttttccgatt

SEQ ID NO: 15261 - DNA, 15 bp, synthetic construct
  source 1..15: mol_type = other DNA
actgttttcgttgac

SEQ ID NO: 15262 - DNA, 15 bp, synthetic construct
  source 1..15: mol_type = other DNA
gtttctactttggct

SEQ ID NO: 15263 - DNA, 15 bp, synthetic construct
  source 1..15: mol_type = other DNA
atctagtggctagga

SEQ ID NO: 15264 - DNA, 15 bp, synthetic construct
  source 1..15: mol_type = other DNA
aacttggtcaatgta

SEQ ID NO: 15265 - DNA, 15 bp, synthetic construct
  source 1..15: mol_type = other DNA
ttgtggtgtagaaaa

SEQ ID NO: 15266 - DNA, 15 bp, synthetic construct
  source 1..15: mol_type = other DNA
atgtgaagtctctgc

SEQ ID NO: 15267 - DNA, 15 bp, synthetic construct
  source 1..15: mol_type = other DNA
cacgaagatttacca

SEQ ID NO: 15268 - DNA, 15 bp, synthetic construct
  source 1..15: mol_type = other DNA
acaaatatgcctcca

SEQ ID NO: 15269 - DNA, 15 bp, synthetic construct
  source 1..15: mol_type = other DNA
tagaatggaaagata

SEQ ID NO: 15270 - DNA, 15 bp, synthetic construct
  source 1..15: mol_type = other DNA
tactgagtaccggtt

SEQ ID NO: 15271 - DNA, 15 bp, synthetic construct
  source 1..15: mol_type = other DNA
tggcccttaatttac

SEQ ID NO: 15272 - DNA, 15 bp, synthetic construct
  source 1..15: mol_type = other DNA
agcttccagtctcta

SEQ ID NO: 15273 - DNA, 15 bp, synthetic construct
  source 1..15: mol_type = other DNA
tctagaagtgctgtt

SEQ ID NO: 15274 - DNA, 15 bp, synthetic construct
  source 1..15: mol_type = other DNA
cttgaactttttaca

SEQ ID NO: 15275 - DNA, 15 bp, synthetic construct
  source 1..15: mol_type = other DNA
cagactatcaagtgc

SEQ ID NO: 15276 - DNA, 15 bp, synthetic construct
  source 1..15: mol_type = other DNA
tcaaaacagctctta

SEQ ID NO: 15277 - DNA, 15 bp, synthetic construct
  source 1..15: mol_type = other DNA
tgaggctaatagatg

SEQ ID NO: 15278 - DNA, 15 bp, synthetic construct
  source 1..15: mol_type = other DNA
gcctgctcagttacc

SEQ ID NO: 15279 - DNA, 15 bp, synthetic construct
  source 1..15: mol_type = other DNA
gcccattacagacgc

SEQ ID NO: 15280 - DNA, 15 bp, synthetic construct
  source 1..15: mol_type = other DNA
ctacccctgacctac

SEQ ID NO: 15281 - DNA, 15 bp, synthetic construct
  source 1..15: mol_type = other DNA
gagtgtgcagtaggt

SEQ ID NO: 15282 - DNA, 15 bp, synthetic construct
  source 1..15: mol_type = other DNA
gaaggacctactcgt

SEQ ID NO: 15283 - DNA, 15 bp, synthetic construct
  source 1..15: mol_type = other DNA
agtatgacagcttgc

SEQ ID NO: 15284 - DNA, 15 bp, synthetic construct
  source 1..15: mol_type = other DNA
gagcaaatcctgcca

SEQ ID NO: 15285 - DNA, 15 bp, synthetic construct
  source 1..15: mol_type = other DNA
cattctctgtcacga

SEQ ID NO: 15286 - DNA, 15 bp, synthetic construct
  source 1..15: mol_type = other DNA
gaaatgcctacttgt

SEQ ID NO: 15287 - DNA, 15 bp, synthetic construct
  source 1..15: mol_type = other DNA
tacaacttacttgaa

SEQ ID NO: 15288 - DNA, 15 bp, synthetic construct
  source 1..15: mol_type = other DNA
atatccccaattcca

SEQ ID NO: 15289 - DNA, 15 bp, synthetic construct
  source 1..15: mol_type = other DNA
gtttaaatgctaggt

SEQ ID NO: 15290 - DNA, 15 bp, synthetic construct
  source 1..15: mol_type = other DNA
tgctctgagtcattg

SEQ ID NO: 15291 - DNA, 15 bp, synthetic construct
  source 1..15: mol_type = other DNA
agggtcccaaggtgc

SEQ ID NO: 15292 - DNA, 15 bp, synthetic construct
  source 1..15: mol_type = other DNA
gatggtgcgactgtt

SEQ ID NO: 15293 - DNA, 15 bp, synthetic construct
  source 1..15: mol_type = other DNA
cggagcgcaaatacc

SEQ ID NO: 15294 - DNA, 15 bp, synthetic construct
  source 1..15: mol_type = other DNA
ctcttcttcttggta

SEQ ID NO: 15295 - DNA, 15 bp, synthetic construct
  source 1..15: mol_type = other DNA
aaattcactaccatg

SEQ ID NO: 15296 - DNA, 15 bp, synthetic construct
  source 1..15: mol_type = other DNA
ggcctctaggtttaa

SEQ ID NO: 15297 - DNA, 15 bp, synthetic construct
  source 1..15: mol_type = other DNA
acgcgtttaatataa

SEQ ID NO: 15298 - DNA, 15 bp, synthetic construct
  source 1..15: mol_type = other DNA
agaagggaagtcacg

SEQ ID NO: 15299 - DNA, 15 bp, synthetic construct
  source 1..15: mol_type = other DNA
tgacaccaagttagc

SEQ ID NO: 15300 - DNA, 15 bp, synthetic construct
  source 1..15: mol_type = other DNA
tagaaagaccagtcc

SEQ ID NO: 15301 - DNA, 15 bp, synthetic construct
  source 1..15: mol_type = other DNA
attgctatgtgtctg

SEQ ID NO: 15302 - DNA, 15 bp, synthetic construct
  source 1..15: mol_type = other DNA
ctttcagcagcttac

SEQ ID NO: 15303 - DNA, 15 bp, synthetic construct
  source 1..15: mol_type = other DNA
atgtattcatgggta

SEQ ID NO: 15304 - DNA, 15 bp, synthetic construct
  source 1..15: mol_type = other DNA
acatagtgagggtta

SEQ ID NO: 15305 - DNA, 15 bp, synthetic construct
  source 1..15: mol_type = other DNA
aggagaatgaacctt

SEQ ID NO: 15306 - DNA, 15 bp, synthetic construct
  source 1..15: mol_type = other DNA
taggcctactttctc

SEQ ID NO: 15307 - DNA, 15 bp, synthetic construct
  source 1..15: mol_type = other DNA
tcaaacctagcatgt

SEQ ID NO: 15308 - DNA, 15 bp, synthetic construct
  source 1..15: mol_type = other DNA
aaatgatagcggaca

SEQ ID NO: 15309 - DNA, 15 bp, synthetic construct
  source 1..15: mol_type = other DNA
aggagaaagatcctt

SEQ ID NO: 15310 - DNA, 15 bp, synthetic construct
  source 1..15: mol_type = other DNA
ggaagctgagaagac

SEQ ID NO: 15311 - DNA, 15 bp, synthetic construct
  source 1..15: mol_type = other DNA
gttgcttttccagag

SEQ ID NO: 15312 - DNA, 15 bp, synthetic construct
  source 1..15: mol_type = other DNA
ttcttttgttttcag

SEQ ID NO: 15313 - DNA, 15 bp, synthetic construct
  source 1..15: mol_type = other DNA
gcctaggtagtttgt

SEQ ID NO: 15314 - DNA, 15 bp, synthetic construct
  source 1..15: mol_type = other DNA
tgagccatgctttga

SEQ ID NO: 15315 - DNA, 15 bp, synthetic construct
  source 1..15: mol_type = other DNA
gcctaggtagtttgt

SEQ ID NO: 15316 - DNA, 15 bp, synthetic construct
  source 1..15: mol_type = other DNA
tgagccatgctttga

SEQ ID NO: 15317 - DNA, 15 bp, synthetic construct
  source 1..15: mol_type = other DNA
cttccagctcgaatg

SEQ ID NO: 15318 - DNA, 15 bp, synthetic construct
  source 1..15: mol_type = other DNA
aggcatgttttagtc

SEQ ID NO: 15319 - DNA, 15 bp, synthetic construct
  source 1..15: mol_type = other DNA
agcaccaaaaagtgt

SEQ ID NO: 15320 - DNA, 15 bp, synthetic construct
  source 1..15: mol_type = other DNA
gatgagctttataac

SEQ ID NO: 15321 - DNA, 15 bp, synthetic construct
  source 1..15: mol_type = other DNA
attagggactcacct

SEQ ID NO: 15322 - DNA, 15 bp, synthetic construct
  source 1..15: mol_type = other DNA
acactactgaagttg

SEQ ID NO: 15323 - DNA, 15 bp, synthetic construct
  source 1..15: mol_type = other DNA
cttacacattaagaa

SEQ ID NO: 15324 - DNA, 15 bp, synthetic construct
  source 1..15: mol_type = other DNA
atatgaaaagtactg

SEQ ID NO: 15325 - DNA, 15 bp, synthetic construct
  source 1..15: mol_type = other DNA
cacttacccgtagac

SEQ ID NO: 15326 - DNA, 15 bp, synthetic construct
  source 1..15: mol_type = other DNA
gtatttttctcctgt

SEQ ID NO: 15327 - DNA, 15 bp, synthetic construct
  source 1..15: mol_type = other DNA
atgtgaatagccttc

SEQ ID NO: 15328 - DNA, 15 bp, synthetic construct
  source 1..15: mol_type = other DNA
ttcttggaagcttgg

SEQ ID NO: 15329 - DNA, 15 bp, synthetic construct
  source 1..15: mol_type = other DNA
tcgttgtaagaagag

SEQ ID NO: 15330 - DNA, 15 bp, synthetic construct
  source 1..15: mol_type = other DNA
ggcaatgttatgctg

SEQ ID NO: 15331 - DNA, 15 bp, synthetic construct
  source 1..15: mol_type = other DNA
gcaattccggctagg

SEQ ID NO: 15332 - DNA, 15 bp, synthetic construct
  source 1..15: mol_type = other DNA
tctcgggaaggcttg

SEQ ID NO: 15333 - DNA, 15 bp, synthetic construct
  source 1..15: mol_type = other DNA
gtagatagctcagta

SEQ ID NO: 15334 - DNA, 15 bp, synthetic construct
  source 1..15: mol_type = other DNA
tgattctgagtcttt

SEQ ID NO: 15335 - DNA, 15 bp, synthetic construct
  source 1..15: mol_type = other DNA
aacaactcttccaat

SEQ ID NO: 15336 - DNA, 15 bp, synthetic construct
  source 1..15: mol_type = other DNA
gcgtgaaaactggca

SEQ ID NO: 15337 - DNA, 15 bp, synthetic construct
  source 1..15: mol_type = other DNA
gctatgacaatttcc

SEQ ID NO: 15338 - DNA, 15 bp, synthetic construct
  source 1..15: mol_type = other DNA
aagggaggagacttg

SEQ ID NO: 15339 - DNA, 15 bp, synthetic construct
  source 1..15: mol_type = other DNA
tttcatggaaccctt

SEQ ID NO: 15340 - DNA, 15 bp, synthetic construct
  source 1..15: mol_type = other DNA
tcttaatccactaga

SEQ ID NO: 15341 - DNA, 15 bp, synthetic construct
  source 1..15: mol_type = other DNA
tgtcccactatcgtt

SEQ ID NO: 15342 - DNA, 15 bp, synthetic construct
  source 1..15: mol_type = other DNA
gagcccaactgtaaa

SEQ ID NO: 15343 - DNA, 15 bp, synthetic construct
  source 1..15: mol_type = other DNA
agtgtagtttgcagc

SEQ ID NO: 15344 - DNA, 15 bp, synthetic construct
  source 1..15: mol_type = other DNA
tgttcccatcaaaaa

SEQ ID NO: 15345 - DNA, 15 bp, synthetic construct
  source 1..15: mol_type = other DNA
ggttttcacagggag

SEQ ID NO: 15346 - DNA, 15 bp, synthetic construct
  source 1..15: mol_type = other DNA
agtaaccaagcctct

SEQ ID NO: 15347 - DNA, 15 bp, synthetic construct
  source 1..15: mol_type = other DNA
cctcaatgtgaagta

SEQ ID NO: 15348 - DNA, 15 bp, synthetic construct
  source 1..15: mol_type = other DNA
cccttagtgccctga

SEQ ID NO: 15349 - DNA, 15 bp, synthetic construct
  source 1..15: mol_type = other DNA
aaaagctgtatctct

SEQ ID NO: 15350 - DNA, 15 bp, synthetic construct
  source 1..15: mol_type = other DNA
aacagcaattccttt

SEQ ID NO: 15351 - DNA, 15 bp, synthetic construct
  source 1..15: mol_type = other DNA
tttctgcagtggaca

SEQ ID NO: 15352 - DNA, 15 bp, synthetic construct
  source 1..15: mol_type = other DNA
gcaatggagaagtat

SEQ ID NO: 15353 - DNA, 15 bp, synthetic construct
  source 1..15: mol_type = other DNA
aaatgtctacatcat

SEQ ID NO: 15354 - DNA, 15 bp, synthetic construct
  source 1..15: mol_type = other DNA
taacctctctagctc

SEQ ID NO: 15355 - DNA, 15 bp, synthetic construct
  source 1..15: mol_type = other DNA
ctaaaaatctgaaaa

SEQ ID NO: 15356 - DNA, 15 bp, synthetic construct
  source 1..15: mol_type = other DNA
cattgaaagctcact

SEQ ID NO: 15357 - DNA, 15 bp, synthetic construct
  source 1..15: mol_type = other DNA
aacagaggctaagaa

SEQ ID NO: 15358 - DNA, 15 bp, synthetic construct
  source 1..15: mol_type = other DNA
ttcatcagcccgtac

SEQ ID NO: 15359 - DNA, 15 bp, synthetic construct
  source 1..15: mol_type = other DNA
gggatgaactgcaat

SEQ ID NO: 15360 - DNA, 15 bp, synthetic construct
  source 1..15: mol_type = other DNA
tgactgtatgactcc

SEQ ID NO: 15361 - DNA, 15 bp, synthetic construct
  source 1..15: mol_type = other DNA
gtgagaatgaagcag

SEQ ID NO: 15362 - DNA, 15 bp, synthetic construct
  source 1..15: mol_type = other DNA
agcaatagggagaag

SEQ ID NO: 15363 - DNA, 15 bp, synthetic construct
  source 1..15: mol_type = other DNA
tttgaatcacctaga

SEQ ID NO: 15364 - DNA, 15 bp, synthetic construct
  source 1..15: mol_type = other DNA
ataatcagaagaatt

SEQ ID NO: 15365 - DNA, 15 bp, synthetic construct
  source 1..15: mol_type = other DNA
tcactcatacgtaca

SEQ ID NO: 15366 - DNA, 15 bp, synthetic construct
  source 1..15: mol_type = other DNA
acacttttcactgat

SEQ ID NO: 15367 - DNA, 15 bp, synthetic construct
  source 1..15: mol_type = other DNA
atagtagagtggaag

SEQ ID NO: 15368 - DNA, 15 bp, synthetic construct
  source 1..15: mol_type = other DNA
agagatttggaaacg

SEQ ID NO: 15369 - DNA, 15 bp, synthetic construct
  source 1..15: mol_type = other DNA
aggaaaatcatagaa

SEQ ID NO: 15370 - DNA, 15 bp, synthetic construct
  source 1..15: mol_type = other DNA
aaggagagccacttc

SEQ ID NO: 15371 - DNA, 15 bp, synthetic construct
  source 1..15: mol_type = other DNA
caggcttcttgcagg

SEQ ID NO: 15372 - DNA, 15 bp, synthetic construct
  source 1..15: mol_type = other DNA
ttcctgtcactgcat

SEQ ID NO: 15373 - DNA, 15 bp, synthetic construct
  source 1..15: mol_type = other DNA
aacaacagcaatgtg

SEQ ID NO: 15374 - DNA, 15 bp, synthetic construct
  source 1..15: mol_type = other DNA
ctaattgtcttttgc

SEQ ID NO: 15375 - DNA, 15 bp, synthetic construct
  source 1..15: mol_type = other DNA
ttcagtgctccttta

SEQ ID NO: 15376 - DNA, 15 bp, synthetic construct
  source 1..15: mol_type = other DNA
tactgccctgcttag

SEQ ID NO: 15377 - DNA, 15 bp, synthetic construct
  source 1..15: mol_type = other DNA
tccaaagcttgagga

SEQ ID NO: 15378 - DNA, 15 bp, synthetic construct
  source 1..15: mol_type = other DNA
tgtcaaggagttttg

SEQ ID NO: 15379 - DNA, 15 bp, synthetic construct
  source 1..15: mol_type = other DNA
gtaggtgattttgtc

SEQ ID NO: 15380 - DNA, 15 bp, synthetic construct
  source 1..15: mol_type = other DNA
tgacttcggactctt

SEQ ID NO: 15381 - DNA, 15 bp, synthetic construct
  source 1..15: mol_type = other DNA
tttctgccctcaaaa

SEQ ID NO: 15382 - DNA, 15 bp, synthetic construct
  source 1..15: mol_type = other DNA
tctcatgcagtttaa

SEQ ID NO: 15383 - DNA, 15 bp, synthetic construct
  source 1..15: mol_type = other DNA
atgggaacaatactg

SEQ ID NO: 15384 - DNA, 15 bp, synthetic construct
  source 1..15: mol_type = other DNA
atgcggttgatcttc

SEQ ID NO: 15385 - DNA, 15 bp, synthetic construct
  source 1..15: mol_type = other DNA
ttcttatcccctata

SEQ ID NO: 15386 - DNA, 15 bp, synthetic construct
  source 1..15: mol_type = other DNA
aaccaagtaaacacg

SEQ ID NO: 15387 - DNA, 15 bp, synthetic construct
  source 1..15: mol_type = other DNA
aagctgaaataagac

SEQ ID NO: 15388 - DNA, 15 bp, synthetic construct
  source 1..15: mol_type = other DNA
gaatgagagagtacc

SEQ ID NO: 15389 - DNA, 15 bp, synthetic construct
  source 1..15: mol_type = other DNA
ttcccactgtgaggc

SEQ ID NO: 15390 - DNA, 15 bp, synthetic construct
  source 1..15: mol_type = other DNA
tcctttctcagctag

SEQ ID NO: 15391 - DNA, 15 bp, synthetic construct
  source 1..15: mol_type = other DNA
actcaacaaatctga

SEQ ID NO: 15392 - DNA, 15 bp, synthetic construct
  source 1..15: mol_type = other DNA
actgtctaagaatcc

SEQ ID NO: 15393 - DNA, 15 bp, synthetic construct
  source 1..15: mol_type = other DNA
tattaaatagctcag

SEQ ID NO: 15394 - DNA, 15 bp, synthetic construct
  source 1..15: mol_type = other DNA
aactagtaagacagg

SEQ ID NO: 15395 - DNA, 15 bp, synthetic construct
  source 1..15: mol_type = other DNA
cctcacaaagaacct

SEQ ID NO: 15396 - DNA, 15 bp, synthetic construct
  source 1..15: mol_type = other DNA
gctgagaagagaaaa

SEQ ID NO: 15397 - DNA, 15 bp, synthetic construct
  source 1..15: mol_type = other DNA
ctcattgtggattgt

SEQ ID NO: 15398 - DNA, 15 bp, synthetic construct
  source 1..15: mol_type = other DNA
tttctcatcttcact

SEQ ID NO: 15399 - DNA, 15 bp, synthetic construct
  source 1..15: mol_type = other DNA
aattgcagtttgagg

SEQ ID NO: 15400 - DNA, 15 bp, synthetic construct
  source 1..15: mol_type = other DNA
ctttgtatgcctatg

SEQ ID NO: 15401 - DNA, 15 bp, synthetic construct
  source 1..15: mol_type = other DNA
taaagctgagttcgt

SEQ ID NO: 15402 - DNA, 15 bp, synthetic construct
  source 1..15: mol_type = other DNA
aggatggagctggat

SEQ ID NO: 15403 - DNA, 15 bp, synthetic construct
  source 1..15: mol_type = other DNA
ggagatggagcttgc

SEQ ID NO: 15404 - DNA, 15 bp, synthetic construct
  source 1..15: mol_type = other DNA
ctaggataccatcag

SEQ ID NO: 15405 - DNA, 15 bp, synthetic construct
  source 1..15: mol_type = other DNA
gatgtgagaatctta

SEQ ID NO: 15406 - DNA, 15 bp, synthetic construct
  source 1..15: mol_type = other DNA
agccttatttccttc

SEQ ID NO: 15407 - DNA, 15 bp, synthetic construct
  source 1..15: mol_type = other DNA
atatgtgtgcattga

SEQ ID NO: 15408 - DNA, 15 bp, synthetic construct
  source 1..15: mol_type = other DNA
tgaggatccataaaa

SEQ ID NO: 15409 - DNA, 15 bp, synthetic construct
  source 1..15: mol_type = other DNA
tgtactgattctcag

SEQ ID NO: 15410 - DNA, 15 bp, synthetic construct
  source 1..15: mol_type = other DNA
ttgaaaaaggaaaac

SEQ ID NO: 15411 - DNA, 15 bp, synthetic construct
  source 1..15: mol_type = other DNA
tacgggagttcttgg

SEQ ID NO: 15412 - DNA, 15 bp, synthetic construct
  source 1..15: mol_type = other DNA
cttttccagcagcag

SEQ ID NO: 15413 - DNA, 15 bp, synthetic construct
  source 1..15: mol_type = other DNA
cctttttagctacac

SEQ ID NO: 15414 - DNA, 15 bp, synthetic construct
  source 1..15: mol_type = other DNA
agaagcacagctttc

SEQ ID NO: 15415 - DNA, 15 bp, synthetic construct
  source 1..15: mol_type = other DNA
agtcttccctttggg

SEQ ID NO: 15416 - DNA, 15 bp, synthetic construct
  source 1..15: mol_type = other DNA
acgagaaaaagtcaa

SEQ ID NO: 15417 - DNA, 15 bp, synthetic construct
  source 1..15: mol_type = other DNA
agacaagatccgttc

SEQ ID NO: 15418 - DNA, 15 bp, synthetic construct
  source 1..15: mol_type = other DNA
tccagcttcttaaag

SEQ ID NO: 15419 - DNA, 15 bp, synthetic construct
  source 1..15: mol_type = other DNA
ttggtgatctcagag

SEQ ID NO: 15420 - DNA, 15 bp, synthetic construct
  source 1..15: mol_type = other DNA
tgactgacttatcct

SEQ ID NO: 15421 - DNA, 15 bp, synthetic construct
  source 1..15: mol_type = other DNA
caatttactcttcag

SEQ ID NO: 15422 - DNA, 15 bp, synthetic construct
  source 1..15: mol_type = other DNA
gggtccctggaataa

SEQ ID NO: 15423 - DNA, 15 bp, synthetic construct
  source 1..15: mol_type = other DNA
acaacattgatggca

SEQ ID NO: 15424 - DNA, 15 bp, synthetic construct
  source 1..15: mol_type = other DNA
gccattctgaccaaa

SEQ ID NO: 15425 - DNA, 15 bp, synthetic construct
  source 1..15: mol_type = other DNA
acactttactcctcc

SEQ ID NO: 15426 - DNA, 15 bp, synthetic construct
  source 1..15: mol_type = other DNA
aaacagatgatcagt

SEQ ID NO: 15427 - DNA, 15 bp, synthetic construct
  source 1..15: mol_type = other DNA
tgacaacaaagggaa

SEQ ID NO: 15428 - DNA, 15 bp, synthetic construct
  source 1..15: mol_type = other DNA
acattcgagtgagaa

SEQ ID NO: 15429 - DNA, 15 bp, synthetic construct
  source 1..15: mol_type = other DNA
ttttggaagatgcgc

SEQ ID NO: 15430 - DNA, 15 bp, synthetic construct
  source 1..15: mol_type = other DNA
atctgagaggtcagc

SEQ ID NO: 15431 - DNA, 15 bp, synthetic construct
  source 1..15: mol_type = other DNA
gcaagggcatgacaa

SEQ ID NO: 15432 - DNA, 15 bp, synthetic construct
  source 1..15: mol_type = other DNA
tgatactgttcttcc

SEQ ID NO: 15433 - DNA, 15 bp, synthetic construct
  source 1..15: mol_type = other DNA
actcctagaaagcgc

SEQ ID NO: 15434 - DNA, 15 bp, synthetic construct
  source 1..15: mol_type = other DNA
ctgtagccaaggtta

SEQ ID NO: 15435 - DNA, 15 bp, synthetic construct
  source 1..15: mol_type = other DNA
tatggcaaaacatac

SEQ ID NO: 15436 - DNA, 15 bp, synthetic construct
  source 1..15: mol_type = other DNA
catctggaaatccac

SEQ ID NO: 15437 - DNA, 15 bp, synthetic construct
  source 1..15: mol_type = other DNA
aatacggcgagccat

SEQ ID NO: 15438 - DNA, 15 bp, synthetic construct
  source 1..15: mol_type = other DNA
ttcagatgcagattg

SEQ ID NO: 15439 - DNA, 15 bp, synthetic construct
  source 1..15: mol_type = other DNA
ggccataccttccca

SEQ ID NO: 15440 - DNA, 15 bp, synthetic construct
  source 1..15: mol_type = other DNA
gaaaggacctgataa

SEQ ID NO: 15441 - DNA, 15 bp, synthetic construct
  source 1..15: mol_type = other DNA
ctgttctaaaacaat

SEQ ID NO: 15442 - DNA, 15 bp, synthetic construct
  source 1..15: mol_type = other DNA
ttgtccattcagggt

SEQ ID NO: 15443 - DNA, 15 bp, synthetic construct
  source 1..15: mol_type = other DNA
aaggaagagggactg

SEQ ID NO: 15444 - DNA, 15 bp, synthetic construct
  source 1..15: mol_type = other DNA
atttcaataaatcac

SEQ ID NO: 15445 - DNA, 15 bp, synthetic construct
  source 1..15: mol_type = other DNA
cttgcaggccagatg

SEQ ID NO: 15446 - DNA, 15 bp, synthetic construct
  source 1..15: mol_type = other DNA
agtgtttgccgtgta

SEQ ID NO: 15447 - DNA, 15 bp, synthetic construct
  source 1..15: mol_type = other DNA
tagttttactcttta

SEQ ID NO: 15448 - DNA, 15 bp, synthetic construct
  source 1..15: mol_type = other DNA
tttcctgcatatctg

SEQ ID NO: 15449 - DNA, 15 bp, synthetic construct
  source 1..15: mol_type = other DNA
ctgttacttacatct

SEQ ID NO: 15450 - DNA, 15 bp, synthetic construct
  source 1..15: mol_type = other DNA
caattctgaaagatt

SEQ ID NO: 15451 - DNA, 15 bp, synthetic construct
  source 1..15: mol_type = other DNA
atctaagcaaaggaa

SEQ ID NO: 15452 - DNA, 15 bp, synthetic construct
  source 1..15: mol_type = other DNA
agcttctctggatag

SEQ ID NO: 15453 - DNA, 15 bp, synthetic construct
  source 1..15: mol_type = other DNA
gctgtttaaggatac

SEQ ID NO: 15454 - DNA, 15 bp, synthetic construct
  source 1..15: mol_type = other DNA
catggactattatta

SEQ ID NO: 15455 - DNA, 15 bp, synthetic construct
  source 1..15: mol_type = other DNA
aatgtcatcaacctt

SEQ ID NO: 15456 - DNA, 15 bp, synthetic construct
  source 1..15: mol_type = other DNA
ctgtaattttagaaa

SEQ ID NO: 15457 - DNA, 15 bp, synthetic construct
  source 1..15: mol_type = other DNA
ctgaagtctgagaaa

SEQ ID NO: 15458 - DNA, 15 bp, synthetic construct
  source 1..15: mol_type = other DNA
catgttttgttcacc

SEQ ID NO: 15459 - DNA, 15 bp, synthetic construct
  source 1..15: mol_type = other DNA
gatactagacttcag

SEQ ID NO: 15460 - DNA, 15 bp, synthetic construct
  source 1..15: mol_type = other DNA
ttcagaaaccaggtc

SEQ ID NO: 15461 - DNA, 15 bp, synthetic construct
  source 1..15: mol_type = other DNA
ttccagatttcaagt

SEQ ID NO: 15462 - DNA, 15 bp, synthetic construct
  source 1..15: mol_type = other DNA
aggtggattctttgt

SEQ ID NO: 15463 - DNA, 15 bp, synthetic construct
  source 1..15: mol_type = other DNA
cactgcttatcgacc

SEQ ID NO: 15464 - DNA, 15 bp, synthetic construct
  source 1..15: mol_type = other DNA
attgcctatctgacc

SEQ ID NO: 15465 - DNA, 15 bp, synthetic construct
  source 1..15: mol_type = other DNA
gaaaaaccatgtctg

SEQ ID NO: 15466 - DNA, 15 bp, synthetic construct
  source 1..15: mol_type = other DNA
ggacagtcattgtga

SEQ ID NO: 15467 - DNA, 15 bp, synthetic construct
  source 1..15: mol_type = other DNA
caaagcagccaataa

SEQ ID NO: 15468 - DNA, 15 bp, synthetic construct
  source 1..15: mol_type = other DNA
gcattttgtctttgt

SEQ ID NO: 15469 - DNA, 15 bp, synthetic construct
  source 1..15: mol_type = other DNA
gagctcgcgacgtgc

SEQ ID NO: 15470 - DNA, 15 bp, synthetic construct
  source 1..15: mol_type = other DNA
gaagttcgcccagaa

SEQ ID NO: 15471 - DNA, 15 bp, synthetic construct
  source 1..15: mol_type = other DNA
gaggtaagccttctg

SEQ ID NO: 15472 - DNA, 15 bp, synthetic construct
  source 1..15: mol_type = other DNA
ctaaagagaatctcg

SEQ ID NO: 15473 - DNA, 15 bp, synthetic construct
  source 1..15: mol_type = other DNA
aattggtgagctact

SEQ ID NO: 15474 - DNA, 15 bp, synthetic construct
  source 1..15: mol_type = other DNA
tgtctgtgcaaacat

SEQ ID NO: 15475 - DNA, 15 bp, synthetic construct
  source 1..15: mol_type = other DNA
acatgaggacagtgc

SEQ ID NO: 15476 - DNA, 15 bp, synthetic construct
  source 1..15: mol_type = other DNA
taaactgccacactc

SEQ ID NO: 15477 - DNA, 15 bp, synthetic construct
  source 1..15: mol_type = other DNA
ccactttttcttaaa

SEQ ID NO: 15478 - DNA, 15 bp, synthetic construct
  source 1..15: mol_type = other DNA
ttcaagaacctagga

SEQ ID NO: 15479 - DNA, 15 bp, synthetic construct
  source 1..15: mol_type = other DNA
tcttctccaattttt

SEQ ID NO: 15480 - DNA, 15 bp, synthetic construct
  source 1..15: mol_type = other DNA
attttacactgttct

SEQ ID NO: 15481 - DNA, 15 bp, synthetic construct
  source 1..15: mol_type = other DNA
catagagaaaaggct

SEQ ID NO: 15482 - DNA, 15 bp, synthetic construct
  source 1..15: mol_type = other DNA
atgataaatggaacc

SEQ ID NO: 15483 - DNA, 15 bp, synthetic construct
  source 1..15: mol_type = other DNA
tgccgagcaataaca

SEQ ID NO: 15484 - DNA, 15 bp, synthetic construct
  source 1..15: mol_type = other DNA
caaaaacctctgcaa

SEQ ID NO: 15485 - DNA, 15 bp, synthetic construct
  source 1..15: mol_type = other DNA
gttcagtggtagtga

SEQ ID NO: 15486 - DNA, 15 bp, synthetic construct
  source 1..15: mol_type = other DNA
tttaggcttgggagt

SEQ ID NO: 15487 - DNA, 15 bp, synthetic construct
  source 1..15: mol_type = other DNA
gcaattcccaaattg

SEQ ID NO: 15488 - DNA, 15 bp, synthetic construct
  source 1..15: mol_type = other DNA
catttctaacatcag

SEQ ID NO: 15489 - DNA, 15 bp, synthetic construct
  source 1..15: mol_type = other DNA
cagactcttttaact

SEQ ID NO: 15490 - DNA, 15 bp, synthetic construct
  source 1..15: mol_type = other DNA
tgggaccgtctatat

SEQ ID NO: 15491 - DNA, 15 bp, synthetic construct
  source 1..15: mol_type = other DNA
tgggaatgactgaat

SEQ ID NO: 15492 - DNA, 15 bp, synthetic construct
  source 1..15: mol_type = other DNA
agacccaataaccac

SEQ ID NO: 15493 - DNA, 15 bp, synthetic construct
  source 1..15: mol_type = other DNA
ggtctgtttagcttg

SEQ ID NO: 15494 - DNA, 15 bp, synthetic construct
  source 1..15: mol_type = other DNA
cagagagagttttcc

SEQ ID NO: 15495 - DNA, 15 bp, synthetic construct
  source 1..15: mol_type = other DNA
actctggtgccatga

SEQ ID NO: 15496 - DNA, 15 bp, synthetic construct
  source 1..15: mol_type = other DNA
tatgtatggcaccac

SEQ ID NO: 15497 - DNA, 15 bp, synthetic construct
  source 1..15: mol_type = other DNA
tgaccatttgttgca

SEQ ID NO: 15498 - DNA, 15 bp, synthetic construct
  source 1..15: mol_type = other DNA
gagcttacttatgac

SEQ ID NO: 15499 - DNA, 15 bp, synthetic construct
  source 1..15: mol_type = other DNA
ttcagctaaaacccc

SEQ ID NO: 15500 - DNA, 15 bp, synthetic construct
  source 1..15: mol_type = other DNA
cctagagcttgatta

SEQ ID NO: 15501 - DNA, 15 bp, synthetic construct
  source 1..15: mol_type = other DNA
aaccagttaaagatc

SEQ ID NO: 15502 - DNA, 15 bp, synthetic construct
  source 1..15: mol_type = other DNA
gccaatactacgttg

SEQ ID NO: 15503 - DNA, 15 bp, synthetic construct
  source 1..15: mol_type = other DNA
ctctaacagcaaaaa

SEQ ID NO: 15504 - DNA, 15 bp, synthetic construct
  source 1..15: mol_type = other DNA
gtcacctttcctaat

SEQ ID NO: 15505 - DNA, 15 bp, synthetic construct
  source 1..15: mol_type = other DNA
gatcgagctatacat

SEQ ID NO: 15506 - DNA, 15 bp, synthetic construct
  source 1..15: mol_type = other DNA
tgcacacctgtaatt

SEQ ID NO: 15507 - DNA, 15 bp, synthetic construct
  source 1..15: mol_type = other DNA
ctgtgattgtggtcc

SEQ ID NO: 15508 - DNA, 15 bp, synthetic construct
  source 1..15: mol_type = other DNA
aggaagtttgctatc

SEQ ID NO: 15509 - DNA, 15 bp, synthetic construct
  source 1..15: mol_type = other DNA
tagaacctggaagct

SEQ ID NO: 15510 - DNA, 15 bp, synthetic construct
  source 1..15: mol_type = other DNA
aagccctccccatcg

SEQ ID NO: 15511 - DNA, 15 bp, synthetic construct
  source 1..15: mol_type = other DNA
gaaactgagatgatg

SEQ ID NO: 15512 - DNA, 15 bp, synthetic construct
  source 1..15: mol_type = other DNA
aagactaagctccat

SEQ ID NO: 15513 - DNA, 15 bp, synthetic construct
  source 1..15: mol_type = other DNA
cttctgcctggtatt

SEQ ID NO: 15514 - DNA, 15 bp, synthetic construct
  source 1..15: mol_type = other DNA
gacgtccccgtagcg

SEQ ID NO: 15515 - DNA, 15 bp, synthetic construct
  source 1..15: mol_type = other DNA
ctgatcagcaggttg

SEQ ID NO: 15516 - DNA, 15 bp, synthetic construct
  source 1..15: mol_type = other DNA
gagtgttcttcacga

SEQ ID NO: 15517 - DNA, 15 bp, synthetic construct
  source 1..15: mol_type = other DNA
ctttcctcaccttac

SEQ ID NO: 15518 - DNA, 15 bp, synthetic construct
  source 1..15: mol_type = other DNA
tctcctggctatagg

SEQ ID NO: 15519 - DNA, 15 bp, synthetic construct
  source 1..15: mol_type = other DNA
ggaggccttcatcct

SEQ ID NO: 15520 - DNA, 15 bp, synthetic construct
  source 1..15: mol_type = other DNA
tggcaagcactttag

SEQ ID NO: 15521 - DNA, 15 bp, synthetic construct
  source 1..15: mol_type = other DNA
tgaatggcttctaca

SEQ ID NO: 15522 - DNA, 15 bp, synthetic construct
  source 1..15: mol_type = other DNA
ctagcagggacaaac

SEQ ID NO: 15523 - DNA, 15 bp, synthetic construct
  source 1..15: mol_type = other DNA
acagaagtctccctc

SEQ ID NO: 15524 - DNA, 15 bp, synthetic construct
  source 1..15: mol_type = other DNA
cttgttaatggcagt

SEQ ID NO: 15525 - DNA, 15 bp, synthetic construct
  source 1..15: mol_type = other DNA
gaagatgatgctgtt

SEQ ID NO: 15526 - DNA, 15 bp, synthetic construct
  source 1..15: mol_type = other DNA
aggtcgactttcacg

SEQ ID NO: 15527 - DNA, 15 bp, synthetic construct
  source 1..15: mol_type = other DNA
agcacgcccgctgtg

SEQ ID NO: 15528 - DNA, 15 bp, synthetic construct
  source 1..15: mol_type = other DNA
gcacttggctaaagc

SEQ ID NO: 15529 - DNA, 15 bp, synthetic construct
  source 1..15: mol_type = other DNA
tagaaattttccctc

SEQ ID NO: 15530 - DNA, 15 bp, synthetic construct
  source 1..15: mol_type = other DNA
ggcctccctgtaatg

SEQ ID NO: 15531 - DNA, 15 bp, synthetic construct
  source 1..15: mol_type = other DNA
gtttctcggatgaca

SEQ ID NO: 15532 - DNA, 15 bp, synthetic construct
  source 1..15: mol_type = other DNA
caaatcttatttggt

SEQ ID NO: 15533 - DNA, 15 bp, synthetic construct
  source 1..15: mol_type = other DNA
agtgtgaatggcttg

SEQ ID NO: 15534 - DNA, 15 bp, synthetic construct
  source 1..15: mol_type = other DNA
attgctaacagcaaa

SEQ ID NO: 15535 - DNA, 15 bp, synthetic construct
  source 1..15: mol_type = other DNA
actgctgggcatttt

SEQ ID NO: 15536 - DNA, 15 bp, synthetic construct
  source 1..15: mol_type = other DNA
ccaatgacatgcaag

SEQ ID NO: 15537 - DNA, 15 bp, synthetic construct
  source 1..15: mol_type = other DNA
gctactatttttccc

SEQ ID NO: 15538 - DNA, 15 bp, synthetic construct
  source 1..15: mol_type = other DNA
cttgaagctttctgt

SEQ ID NO: 15539 - DNA, 15 bp, synthetic construct
  source 1..15: mol_type = other DNA
tgaaaaatccggaaa

SEQ ID NO: 15540 - DNA, 15 bp, synthetic construct
  source 1..15: mol_type = other DNA
tatttgatgtttgcc

SEQ ID NO: 15541 - DNA, 15 bp, synthetic construct
  source 1..15: mol_type = other DNA
tgtattatgctcata

SEQ ID NO: 15542 - DNA, 15 bp, synthetic construct
  source 1..15: mol_type = other DNA
atatcagagtggctt

SEQ ID NO: 15543 - DNA, 15 bp, synthetic construct
  source 1..15: mol_type = other DNA
ggtcgatcacttttt

SEQ ID NO: 15544 - DNA, 15 bp, synthetic construct
  source 1..15: mol_type = other DNA
aaaggctggaatcta

SEQ ID NO: 15545 - DNA, 15 bp, synthetic construct
  source 1..15: mol_type = other DNA
ggtcatctcttatta

SEQ ID NO: 15546 - DNA, 15 bp, synthetic construct
  source 1..15: mol_type = other DNA
tcaaaggagtgctag

SEQ ID NO: 15547 - DNA, 15 bp, synthetic construct
  source 1..15: mol_type = other DNA
ttaagatggtccact

SEQ ID NO: 15548 - DNA, 15 bp, synthetic construct
  source 1..15: mol_type = other DNA
gtgttaactcactgc

SEQ ID NO: 15549 - DNA, 15 bp, synthetic construct
  source 1..15: mol_type = other DNA
tactttcagcacaat

SEQ ID NO: 15550 - DNA, 15 bp, synthetic construct
  source 1..15: mol_type = other DNA
ttctcagaggaactg

SEQ ID NO: 15551 - DNA, 15 bp, synthetic construct
  source 1..15: mol_type = other DNA
ctcaaccttctcacc

SEQ ID NO: 15552 - DNA, 15 bp, synthetic construct
  source 1..15: mol_type = other DNA
atagcaaaagttctg

SEQ ID NO: 15553 - DNA, 15 bp, synthetic construct
  source 1..15: mol_type = other DNA
ctcaaccttctcacc

SEQ ID NO: 15554 - DNA, 15 bp, synthetic construct
  source 1..15: mol_type = other DNA
atagcaaaagttctg

SEQ ID NO: 15555 - DNA, 15 bp, synthetic construct
  source 1..15: mol_type = other DNA
agtaggcctttgtac

SEQ ID NO: 15556 - DNA, 15 bp, synthetic construct
  source 1..15: mol_type = other DNA
atatattttaattct

SEQ ID NO: 15557 - DNA, 15 bp, synthetic construct
  source 1..15: mol_type = other DNA
catcttttcctgtct

SEQ ID NO: 15558 - DNA, 15 bp, synthetic construct
  source 1..15: mol_type = other DNA
acaacattctttacc

SEQ ID NO: 15559 - DNA, 15 bp, synthetic construct
  source 1..15: mol_type = other DNA
caagaccccataggg

SEQ ID NO: 15560 - DNA, 15 bp, synthetic construct
  source 1..15: mol_type = other DNA
gtcttatctcgttcg

SEQ ID NO: 15561 - DNA, 15 bp, synthetic construct
  source 1..15: mol_type = other DNA
gatttggcttctaac

SEQ ID NO: 15562 - DNA, 15 bp, synthetic construct
  source 1..15: mol_type = other DNA
acttatttgcatttc

SEQ ID NO: 15563 - DNA, 15 bp, synthetic construct
  source 1..15: mol_type = other DNA
tcttactaggaagca

SEQ ID NO: 15564 - DNA, 15 bp, synthetic construct
  source 1..15: mol_type = other DNA
ttgcctttccctcca

SEQ ID NO: 15565 - DNA, 15 bp, synthetic construct
  source 1..15: mol_type = other DNA
tcttaaccccctacc

SEQ ID NO: 15566 - DNA, 15 bp, synthetic construct
  source 1..15: mol_type = other DNA
aaaaatctccaattt

SEQ ID NO: 15567 - DNA, 15 bp, synthetic construct
  source 1..15: mol_type = other DNA
tcaacagattcagaa

SEQ ID NO: 15568 - DNA, 15 bp, synthetic construct
  source 1..15: mol_type = other DNA
tgtattcttgaacct

SEQ ID NO: 15569 - DNA, 15 bp, synthetic construct
  source 1..15: mol_type = other DNA
attcagatttgagag

SEQ ID NO: 15570 - DNA, 15 bp, synthetic construct
  source 1..15: mol_type = other DNA
gtacctcctgttcac

SEQ ID NO: 15571 - DNA, 15 bp, synthetic construct
  source 1..15: mol_type = other DNA
tggacaaggttacaa

SEQ ID NO: 15572 - DNA, 15 bp, synthetic construct
  source 1..15: mol_type = other DNA
tggacaaggttacaa

SEQ ID NO: 15573 - DNA, 15 bp, synthetic construct
  source 1..15: mol_type = other DNA
atggtgtagaacaag

SEQ ID NO: 15574 - DNA, 15 bp, synthetic construct
  source 1..15: mol_type = other DNA
acgtgacctacttcc

SEQ ID NO: 15575 - DNA, 15 bp, synthetic construct
  source 1..15: mol_type = other DNA
agagccgatcaggac

SEQ ID NO: 15576 - DNA, 15 bp, synthetic construct
  source 1..15: mol_type = other DNA
ccaagtgttaatgac

SEQ ID NO: 15577 - DNA, 15 bp, synthetic construct
  source 1..15: mol_type = other DNA
gaacaaatgaatgca

SEQ ID NO: 15578 - DNA, 15 bp, synthetic construct
  source 1..15: mol_type = other DNA
atgactacaagctga

SEQ ID NO: 15579 - DNA, 15 bp, synthetic construct
  source 1..15: mol_type = other DNA
acagcacaatgtctg

SEQ ID NO: 15580 - DNA, 15 bp, synthetic construct
  source 1..15: mol_type = other DNA
ggactatgtgatcat

SEQ ID NO: 15581 - DNA, 15 bp, synthetic construct
  source 1..15: mol_type = other DNA
cttagaagagatata

SEQ ID NO: 15582 - DNA, 15 bp, synthetic construct
  source 1..15: mol_type = other DNA
ttcccagaattagtc

SEQ ID NO: 15583 - DNA, 15 bp, synthetic construct
  source 1..15: mol_type = other DNA
ctggtcacttacttg

SEQ ID NO: 15584 - DNA, 15 bp, synthetic construct
  source 1..15: mol_type = other DNA
gatcatccggcctgt

SEQ ID NO: 15585 - DNA, 15 bp, synthetic construct
  source 1..15: mol_type = other DNA
ctggtcacttacttg

SEQ ID NO: 15586 - DNA, 15 bp, synthetic construct
  source 1..15: mol_type = other DNA
gatcatccggcctgt

SEQ ID NO: 15587 - DNA, 15 bp, synthetic construct
  source 1..15: mol_type = other DNA
ggacacctcgaaatg

SEQ ID NO: 15588 - DNA, 15 bp, synthetic construct
  source 1..15: mol_type = other DNA
agggttccacagaat

SEQ ID NO: 15589 - DNA, 15 bp, synthetic construct
  source 1..15: mol_type = other DNA
cctccggagccctaa

SEQ ID NO: 15590 - DNA, 15 bp, synthetic construct
  source 1..15: mol_type = other DNA
aggccgtctctgcga

SEQ ID NO: 15591 - DNA, 15 bp, synthetic construct
  source 1..15: mol_type = other DNA
gtgagaccaaaagtc

SEQ ID NO: 15592 - DNA, 15 bp, synthetic construct
  source 1..15: mol_type = other DNA
cgagaagacgccgta

SEQ ID NO: 15593 - DNA, 15 bp, synthetic construct
  source 1..15: mol_type = other DNA
tccgacttccccatc

SEQ ID NO: 15594 - DNA, 15 bp, synthetic construct
  source 1..15: mol_type = other DNA
aagttaaacaacgtg

SEQ ID NO: 15595 - DNA, 15 bp, synthetic construct
  source 1..15: mol_type = other DNA
aaatgagccaagccc

SEQ ID NO: 15596 - DNA, 15 bp, synthetic construct
  source 1..15: mol_type = other DNA
gaaatggaacgcaag

SEQ ID NO: 15597 - DNA, 15 bp, synthetic construct
  source 1..15: mol_type = other DNA
aggagggatactccc

SEQ ID NO: 15598 - DNA, 15 bp, synthetic construct
  source 1..15: mol_type = other DNA
cactgataaccacac

SEQ ID NO: 15599 - DNA, 15 bp, synthetic construct
  source 1..15: mol_type = other DNA
tgtggataatcttgg

SEQ ID NO: 15600 - DNA, 15 bp, synthetic construct
  source 1..15: mol_type = other DNA
ctccgttcttatctt

SEQ ID NO: 15601 - DNA, 15 bp, synthetic construct
  source 1..15: mol_type = other DNA
atgtgtaaacagtat

SEQ ID NO: 15602 - DNA, 15 bp, synthetic construct
  source 1..15: mol_type = other DNA
atgaaaagaaagact

SEQ ID NO: 15603 - DNA, 15 bp, synthetic construct
  source 1..15: mol_type = other DNA
tgtggcgactctttg

SEQ ID NO: 15604 - DNA, 15 bp, synthetic construct
  source 1..15: mol_type = other DNA
ctctgtgtgggaaca

SEQ ID NO: 15605 - DNA, 15 bp, synthetic construct
  source 1..15: mol_type = other DNA
tgaaacctgatgact

SEQ ID NO: 15606 - DNA, 15 bp, synthetic construct
  source 1..15: mol_type = other DNA
tgccgggtgtctata

SEQ ID NO: 15607 - DNA, 15 bp, synthetic construct
  source 1..15: mol_type = other DNA
tgaaacctgatgact

SEQ ID NO: 15608 - DNA, 15 bp, synthetic construct
  source 1..15: mol_type = other DNA
tgccgggtgtctata

SEQ ID NO: 15609 - DNA, 15 bp, synthetic construct
  source 1..15: mol_type = other DNA
aaacacagtggattc

SEQ ID NO: 15610 - DNA, 15 bp, synthetic construct
  source 1..15: mol_type = other DNA
cagtaattaccactc

SEQ ID NO: 15611 - DNA, 15 bp, synthetic construct
  source 1..15: mol_type = other DNA
ttggaatggtcctta

SEQ ID NO: 15612 - DNA, 15 bp, synthetic construct
  source 1..15: mol_type = other DNA
ggagttaagtgagtg

SEQ ID NO: 15613 - DNA, 15 bp, synthetic construct
  source 1..15: mol_type = other DNA
agcctttgtaagtcc

SEQ ID NO: 15614 - DNA, 15 bp, synthetic construct
  source 1..15: mol_type = other DNA
gagaatgtgcttacc

SEQ ID NO: 15615 - DNA, 15 bp, synthetic construct
  source 1..15: mol_type = other DNA
ggaagagttttggga

SEQ ID NO: 15616 - DNA, 15 bp, synthetic construct
  source 1..15: mol_type = other DNA
cgtggccaggaactc

SEQ ID NO: 15617 - DNA, 15 bp, synthetic construct
  source 1..15: mol_type = other DNA
tatccagggacacag

SEQ ID NO: 15618 - DNA, 15 bp, synthetic construct
  source 1..15: mol_type = other DNA
gtccccctacaacat

SEQ ID NO: 15619 - DNA, 15 bp, synthetic construct
  source 1..15: mol_type = other DNA
tttgacatcaacctc

SEQ ID NO: 15620 - DNA, 15 bp, synthetic construct
  source 1..15: mol_type = other DNA
tgacagggttaatgc

SEQ ID NO: 15621 - DNA, 15 bp, synthetic construct
  source 1..15: mol_type = other DNA
tgttggacaatggga

SEQ ID NO: 15622 - DNA, 15 bp, synthetic construct
  source 1..15: mol_type = other DNA
catcatatcccaaaa

SEQ ID NO: 15623 - DNA, 15 bp, synthetic construct
  source 1..15: mol_type = other DNA
cctcgcgtccattgc

SEQ ID NO: 15624 - DNA, 15 bp, synthetic construct
  source 1..15: mol_type = other DNA
cagagttgtgagata

SEQ ID NO: 15625 - DNA, 15 bp, synthetic construct
  source 1..15: mol_type = other DNA
tccctttcctgtgat

SEQ ID NO: 15626 - DNA, 15 bp, synthetic construct
  source 1..15: mol_type = other DNA
tgcgtgagaacagat

SEQ ID NO: 15627 - DNA, 15 bp, synthetic construct
  source 1..15: mol_type = other DNA
gactgatccttgtcc

SEQ ID NO: 15628 - DNA, 15 bp, synthetic construct
  source 1..15: mol_type = other DNA
caatggctttatttg

SEQ ID NO: 15629 - DNA, 15 bp, synthetic construct
  source 1..15: mol_type = other DNA
actggtagtcacttg

SEQ ID NO: 15630 - DNA, 15 bp, synthetic construct
  source 1..15: mol_type = other DNA
ggtcacatcttccta

SEQ ID NO: 15631 - DNA, 15 bp, synthetic construct
  source 1..15: mol_type = other DNA
tttgttgctgataac

SEQ ID NO: 15632 - DNA, 15 bp, synthetic construct
  source 1..15: mol_type = other DNA
ctcattgtcaagcct

SEQ ID NO: 15633 - DNA, 15 bp, synthetic construct
  source 1..15: mol_type = other DNA
aaagagatcagataa

SEQ ID NO: 15634 - DNA, 15 bp, synthetic construct
  source 1..15: mol_type = other DNA
ggtgtgctgaagttg

SEQ ID NO: 15635 - DNA, 15 bp, synthetic construct
  source 1..15: mol_type = other DNA
atggcagagatcccg

SEQ ID NO: 15636 - DNA, 15 bp, synthetic construct
  source 1..15: mol_type = other DNA
cagtgacagtgagga

SEQ ID NO: 15637 - DNA, 15 bp, synthetic construct
  source 1..15: mol_type = other DNA
ggtgtctgcatctag

SEQ ID NO: 15638 - DNA, 15 bp, synthetic construct
  source 1..15: mol_type = other DNA
gagatgtgatttatt

SEQ ID NO: 15639 - DNA, 15 bp, synthetic construct
  source 1..15: mol_type = other DNA
gtggctgagttgggc

SEQ ID NO: 15640 - DNA, 15 bp, synthetic construct
  source 1..15: mol_type = other DNA
tttggcctcttcgtt

SEQ ID NO: 15641 - DNA, 15 bp, synthetic construct
  source 1..15: mol_type = other DNA
taactggctcagatt

SEQ ID NO: 15642 - DNA, 15 bp, synthetic construct
  source 1..15: mol_type = other DNA
tcctgatatgggaag

SEQ ID NO: 15643 - DNA, 15 bp, synthetic construct
  source 1..15: mol_type = other DNA
aggaggcagaatacc

SEQ ID NO: 15644 - DNA, 15 bp, synthetic construct
  source 1..15: mol_type = other DNA
gactcctcacttaga

SEQ ID NO: 15645 - DNA, 15 bp, synthetic construct
  source 1..15: mol_type = other DNA
gaagggcaggcctag

SEQ ID NO: 15646 - DNA, 15 bp, synthetic construct
  source 1..15: mol_type = other DNA
acaatttgtgacagc

SEQ ID NO: 15647 - DNA, 15 bp, synthetic construct
  source 1..15: mol_type = other DNA
ttagctcctgaaacc

SEQ ID NO: 15648 - DNA, 15 bp, synthetic construct
  source 1..15: mol_type = other DNA
ctcagtcccacgtct

SEQ ID NO: 15649 - DNA, 15 bp, synthetic construct
  source 1..15: mol_type = other DNA
actgggcactgcgtc

SEQ ID NO: 15650 - DNA, 15 bp, synthetic construct
  source 1..15: mol_type = other DNA
ggtggaatccttgcg

SEQ ID NO: 15651 - DNA, 15 bp, synthetic construct
  source 1..15: mol_type = other DNA
cagccccgtacgatt

SEQ ID NO: 15652 - DNA, 15 bp, synthetic construct
  source 1..15: mol_type = other DNA
aaagtcccgatttca

SEQ ID NO: 15653 - DNA, 15 bp, synthetic construct
  source 1..15: mol_type = other DNA
ggtccagttcttttg

SEQ ID NO: 15654 - DNA, 15 bp, synthetic construct
  source 1..15: mol_type = other DNA
ggcctttgtccaagc

SEQ ID NO: 15655 - DNA, 15 bp, synthetic construct
  source 1..15: mol_type = other DNA
cggacatcaatcatc

SEQ ID NO: 15656 - DNA, 15 bp, synthetic construct
  source 1..15: mol_type = other DNA
gtccacgctccgtta

SEQ ID NO: 15657 - DNA, 15 bp, synthetic construct
  source 1..15: mol_type = other DNA
aggctcgagcgtttc

SEQ ID NO: 15658 - DNA, 15 bp, synthetic construct
  source 1..15: mol_type = other DNA
acctgtttctgatga

SEQ ID NO: 15659 - DNA, 15 bp, synthetic construct
  source 1..15: mol_type = other DNA
ctctaagctttcccc

SEQ ID NO: 15660 - DNA, 15 bp, synthetic construct
  source 1..15: mol_type = other DNA
tctcctcgacctttc

SEQ ID NO: 15661 - DNA, 15 bp, synthetic construct
  source 1..15: mol_type = other DNA
caccagggctgtagg

SEQ ID NO: 15662 - DNA, 15 bp, synthetic construct
  source 1..15: mol_type = other DNA
gcagaggctggtgta

SEQ ID NO: 15663 - DNA, 15 bp, synthetic construct
  source 1..15: mol_type = other DNA
tgctcgtgctccttc

SEQ ID NO: 15664 - DNA, 15 bp, synthetic construct
  source 1..15: mol_type = other DNA
caatactgtgtctgt

SEQ ID NO: 15665 - DNA, 15 bp, synthetic construct
  source 1..15: mol_type = other DNA
tcctgattctgtccc

SEQ ID NO: 15666 - DNA, 15 bp, synthetic construct
  source 1..15: mol_type = other DNA
aggccatcacatgcc

SEQ ID NO: 15667 - DNA, 15 bp, synthetic construct
  source 1..15: mol_type = other DNA
gaggatgagaggtag

SEQ ID NO: 15668 - DNA, 15 bp, synthetic construct
  source 1..15: mol_type = other DNA
ttgtggctacgtgtt

SEQ ID NO: 15669 - DNA, 15 bp, synthetic construct
  source 1..15: mol_type = other DNA
caggcatacaatggc

SEQ ID NO: 15670 - DNA, 15 bp, synthetic construct
  source 1..15: mol_type = other DNA
aacgaggacatcgtg

SEQ ID NO: 15671 - DNA, 15 bp, synthetic construct
  source 1..15: mol_type = other DNA
gcttgccgtcgatct

SEQ ID NO: 15672 - DNA, 15 bp, synthetic construct
  source 1..15: mol_type = other DNA
tgttccttctctaat

SEQ ID NO: 15673 - DNA, 15 bp, synthetic construct
  source 1..15: mol_type = other DNA
tcacttcactggacc

SEQ ID NO: 15674 - DNA, 15 bp, synthetic construct
  source 1..15: mol_type = other DNA
cctacttttccttag

SEQ ID NO: 15675 - DNA, 15 bp, synthetic construct
  source 1..15: mol_type = other DNA
ttctgctcctcaatc

SEQ ID NO: 15676 - DNA, 15 bp, synthetic construct
  source 1..15: mol_type = other DNA
agaagatcctgaaga

SEQ ID NO: 15677 - DNA, 15 bp, synthetic construct
  source 1..15: mol_type = other DNA
ttctgctcctcaatc

SEQ ID NO: 15678 - DNA, 15 bp, synthetic construct
  source 1..15: mol_type = other DNA
agaagatcctgaaga

SEQ ID NO: 15679 - DNA, 15 bp, synthetic construct
  source 1..15: mol_type = other DNA
ctcttccgtcttaat

SEQ ID NO: 15680 - DNA, 15 bp, synthetic construct
  source 1..15: mol_type = other DNA
taagtgtttgcgtct

SEQ ID NO: 15681 - DNA, 15 bp, synthetic construct
  source 1..15: mol_type = other DNA
caggctaagtgacct

SEQ ID NO: 15682 - DNA, 15 bp, synthetic construct
  source 1..15: mol_type = other DNA
ctcgagcggaacgtg

SEQ ID NO: 15683 - DNA, 15 bp, synthetic construct
  source 1..15: mol_type = other DNA
gtctcctcgcgaagc

SEQ ID NO: 15684 - DNA, 15 bp, synthetic construct
  source 1..15: mol_type = other DNA
tatcacccacctacc

SEQ ID NO: 15685 - DNA, 15 bp, synthetic construct
  source 1..15: mol_type = other DNA
ctggtcccaaggatg

SEQ ID NO: 15686 - DNA, 15 bp, synthetic construct
  source 1..15: mol_type = other DNA
cagccagcgtatccg

SEQ ID NO: 15687 - DNA, 15 bp, synthetic construct
  source 1..15: mol_type = other DNA
ccccgagactaacct

SEQ ID NO: 15688 - DNA, 15 bp, synthetic construct
  source 1..15: mol_type = other DNA
gacattcccgctttc

SEQ ID NO: 15689 - DNA, 15 bp, synthetic construct
  source 1..15: mol_type = other DNA
agaagtaacgatgag

SEQ ID NO: 15690 - DNA, 15 bp, synthetic construct
  source 1..15: mol_type = other DNA
cccccactgtcagtt

SEQ ID NO: 15691 - DNA, 15 bp, synthetic construct
  source 1..15: mol_type = other DNA
tgccccaactgacag

SEQ ID NO: 15692 - DNA, 15 bp, synthetic construct
  source 1..15: mol_type = other DNA
agaaataggatcagc

SEQ ID NO: 15693 - DNA, 15 bp, synthetic construct
  source 1..15: mol_type = other DNA
tcaaggcaaagctct

SEQ ID NO: 15694 - DNA, 15 bp, synthetic construct
  source 1..15: mol_type = other DNA
catcctgggtttata

SEQ ID NO: 15695 - DNA, 15 bp, synthetic construct
  source 1..15: mol_type = other DNA
agacggtgcgatccc

SEQ ID NO: 15696 - DNA, 15 bp, synthetic construct
  source 1..15: mol_type = other DNA
cgcagggatgatgac

SEQ ID NO: 15697 - DNA, 15 bp, synthetic construct
  source 1..15: mol_type = other DNA
tgaaagcatgagtgg

SEQ ID NO: 15698 - DNA, 15 bp, synthetic construct
  source 1..15: mol_type = other DNA
ctcgacctcatacag

SEQ ID NO: 15699 - DNA, 15 bp, synthetic construct
  source 1..15: mol_type = other DNA
caacttcatctccag

SEQ ID NO: 15700 - DNA, 15 bp, synthetic construct
  source 1..15: mol_type = other DNA
cactcctgcctgtcg

SEQ ID NO: 15701 - DNA, 15 bp, synthetic construct
  source 1..15: mol_type = other DNA
ccatcctgagaaact

SEQ ID NO: 15702 - DNA, 15 bp, synthetic construct
  source 1..15: mol_type = other DNA
accgagactttctgg

SEQ ID NO: 15703 - DNA, 15 bp, synthetic construct
  source 1..15: mol_type = other DNA
ttgtactgctccatg

SEQ ID NO: 15704 - DNA, 15 bp, synthetic construct
  source 1..15: mol_type = other DNA
tggaagagtagatag

SEQ ID NO: 15705 - DNA, 15 bp, synthetic construct
  source 1..15: mol_type = other DNA
ctctccaccactccc

SEQ ID NO: 15706 - DNA, 15 bp, synthetic construct
  source 1..15: mol_type = other DNA
ccgggcctgcaccga

SEQ ID NO: 15707 - DNA, 15 bp, synthetic construct
  source 1..15: mol_type = other DNA
cagctcgcgcaagag

SEQ ID NO: 15708 - DNA, 15 bp, synthetic construct
  source 1..15: mol_type = other DNA
acaccctcaactacg

SEQ ID NO: 15709 - DNA, 15 bp, synthetic construct
  source 1..15: mol_type = other DNA
ccgcggtggatgatg

SEQ ID NO: 15710 - DNA, 15 bp, synthetic construct
  source 1..15: mol_type = other DNA
tcgcgccctcaggat

SEQ ID NO: 15711 - DNA, 15 bp, synthetic construct
  source 1..15: mol_type = other DNA
accgtcttggcgttc

SEQ ID NO: 15712 - DNA, 15 bp, synthetic construct
  source 1..15: mol_type = other DNA
cgcgactccaagatc

SEQ ID NO: 15713 - DNA, 15 bp, synthetic construct
  source 1..15: mol_type = other DNA
accgtcttggcgttc

SEQ ID NO: 15714 - DNA, 15 bp, synthetic construct
  source 1..15: mol_type = other DNA
cgcgactccaagatc

SEQ ID NO: 15715 - DNA, 15 bp, synthetic construct
  source 1..15: mol_type = other DNA
tgtgctggacactcc

SEQ ID NO: 15716 - DNA, 15 bp, synthetic construct
  source 1..15: mol_type = other DNA
gctgctcgtctccaa

SEQ ID NO: 15717 - DNA, 15 bp, synthetic construct
  source 1..15: mol_type = other DNA
gatgctctccttgag

SEQ ID NO: 15718 - DNA, 15 bp, synthetic construct
  source 1..15: mol_type = other DNA
tcaaccacctgtcta

SEQ ID NO: 15719 - DNA, 15 bp, synthetic construct
  source 1..15: mol_type = other DNA
ggtcacggtgaagac

SEQ ID NO: 15720 - DNA, 15 bp, synthetic construct
  source 1..15: mol_type = other DNA
agttctgctctgcct

SEQ ID NO: 15721 - DNA, 15 bp, synthetic construct
  source 1..15: mol_type = other DNA
aggagttgccattcc

SEQ ID NO: 15722 - DNA, 15 bp, synthetic construct
  source 1..15: mol_type = other DNA
tcatcgatgagaacg

SEQ ID NO: 15723 - DNA, 15 bp, synthetic construct
  source 1..15: mol_type = other DNA
ttgtacacttccagg

SEQ ID NO: 15724 - DNA, 15 bp, synthetic construct
  source 1..15: mol_type = other DNA
cctagagcaccatcc

SEQ ID NO: 15725 - DNA, 15 bp, synthetic construct
  source 1..15: mol_type = other DNA
cctgtctaggaaatc

SEQ ID NO: 15726 - DNA, 15 bp, synthetic construct
  source 1..15: mol_type = other DNA
tcgagggcttcaatg

SEQ ID NO: 15727 - DNA, 15 bp, synthetic construct
  source 1..15: mol_type = other DNA
atggtgtatgtcttc

SEQ ID NO: 15728 - DNA, 15 bp, synthetic construct
  source 1..15: mol_type = other DNA
ccctgcgagttcgac

SEQ ID NO: 15729 - DNA, 15 bp, synthetic construct
  source 1..15: mol_type = other DNA
aagccaaagtgtcgg

SEQ ID NO: 15730 - DNA, 15 bp, synthetic construct
  source 1..15: mol_type = other DNA
tcctggagtacaagt

SEQ ID NO: 15731 - DNA, 15 bp, synthetic construct
  source 1..15: mol_type = other DNA
ggaatgtgttcaggg

SEQ ID NO: 15732 - DNA, 15 bp, synthetic construct
  source 1..15: mol_type = other DNA
tcacgtctctgtcta

SEQ ID NO: 15733 - DNA, 15 bp, synthetic construct
  source 1..15: mol_type = other DNA
ttgttacccagatac

SEQ ID NO: 15734 - DNA, 15 bp, synthetic construct
  source 1..15: mol_type = other DNA
ccactcaggactagc

SEQ ID NO: 15735 - DNA, 15 bp, synthetic construct
  source 1..15: mol_type = other DNA
ctgtgaggatcagac

SEQ ID NO: 15736 - DNA, 15 bp, synthetic construct
  source 1..15: mol_type = other DNA
gatactgtctgtagc

SEQ ID NO: 15737 - DNA, 15 bp, synthetic construct
  source 1..15: mol_type = other DNA
aaatatgaatgggag

SEQ ID NO: 15738 - DNA, 15 bp, synthetic construct
  source 1..15: mol_type = other DNA
tgttccttgggccat

SEQ ID NO: 15739 - DNA, 15 bp, synthetic construct
  source 1..15: mol_type = other DNA
aatggaatgaaccca

SEQ ID NO: 15740 - DNA, 15 bp, synthetic construct
  source 1..15: mol_type = other DNA
atagttgaacagctt

SEQ ID NO: 15741 - DNA, 15 bp, synthetic construct
  source 1..15: mol_type = other DNA
aattcattctgtccc

SEQ ID NO: 15742 - DNA, 15 bp, synthetic construct
  source 1..15: mol_type = other DNA
ctcagtaaatagtct

SEQ ID NO: 15743 - DNA, 15 bp, synthetic construct
  source 1..15: mol_type = other DNA
ctctccctagtagct

SEQ ID NO: 15744 - DNA, 15 bp, synthetic construct
  source 1..15: mol_type = other DNA
ttttagggtgcctct

SEQ ID NO: 15745 - DNA, 15 bp, synthetic construct
  source 1..15: mol_type = other DNA
tccctaaggcatagt

SEQ ID NO: 15746 - DNA, 15 bp, synthetic construct
  source 1..15: mol_type = other DNA
aggaacacatagacc

SEQ ID NO: 15747 - DNA, 15 bp, synthetic construct
  source 1..15: mol_type = other DNA
tccctaaggcatagt

SEQ ID NO: 15748 - DNA, 15 bp, synthetic construct
  source 1..15: mol_type = other DNA
aggaacacatagacc

SEQ ID NO: 15749 - DNA, 15 bp, synthetic construct
  source 1..15: mol_type = other DNA
cgacacctgcatagg

SEQ ID NO: 15750 - DNA, 15 bp, synthetic construct
  source 1..15: mol_type = other DNA
ttagcatagatggca

SEQ ID NO: 15751 - DNA, 15 bp, synthetic construct
  source 1..15: mol_type = other DNA
acatcttttaagggt

SEQ ID NO: 15752 - DNA, 15 bp, synthetic construct
  source 1..15: mol_type = other DNA
tcggattttgcctta

SEQ ID NO: 15753 - DNA, 15 bp, synthetic construct
  source 1..15: mol_type = other DNA
accaagtaagaccat

SEQ ID NO: 15754 - DNA, 15 bp, synthetic construct
  source 1..15: mol_type = other DNA
tcgtgtctgaggttg

SEQ ID NO: 15755 - DNA, 15 bp, synthetic construct
  source 1..15: mol_type = other DNA
tagtattagaagggg

SEQ ID NO: 15756 - DNA, 15 bp, synthetic construct
  source 1..15: mol_type = other DNA
tcctgtactgtcatt

SEQ ID NO: 15757 - DNA, 15 bp, synthetic construct
  source 1..15: mol_type = other DNA
tcccatagactcagc

SEQ ID NO: 15758 - DNA, 15 bp, synthetic construct
  source 1..15: mol_type = other DNA
gaagtcctcattgga

SEQ ID NO: 15759 - DNA, 15 bp, synthetic construct
  source 1..15: mol_type = other DNA
atgaggacttctcct

SEQ ID NO: 15760 - DNA, 15 bp, synthetic construct
  source 1..15: mol_type = other DNA
tcagatgtggacttt

SEQ ID NO: 15761 - DNA, 15 bp, synthetic construct
  source 1..15: mol_type = other DNA
ccacacttgatgcgg

SEQ ID NO: 15762 - DNA, 15 bp, synthetic construct
  source 1..15: mol_type = other DNA
gaagacacgggaata

SEQ ID NO: 15763 - DNA, 15 bp, synthetic construct
  source 1..15: mol_type = other DNA
gctgaaagatgacag

SEQ ID NO: 15764 - DNA, 15 bp, synthetic construct
  source 1..15: mol_type = other DNA
aataattagctcctg

SEQ ID NO: 15765 - DNA, 15 bp, synthetic construct
  source 1..15: mol_type = other DNA
gtgcccttggataac

SEQ ID NO: 15766 - DNA, 15 bp, synthetic construct
  source 1..15: mol_type = other DNA
ctgggttgattcata

SEQ ID NO: 15767 - DNA, 15 bp, synthetic construct
  source 1..15: mol_type = other DNA
aaggttatattggta

SEQ ID NO: 15768 - DNA, 15 bp, synthetic construct
  source 1..15: mol_type = other DNA
tttgtggcggacctt

SEQ ID NO: 15769 - DNA, 15 bp, synthetic construct
  source 1..15: mol_type = other DNA
gaccaggaaaagaag

SEQ ID NO: 15770 - DNA, 15 bp, synthetic construct
  source 1..15: mol_type = other DNA
ttgtcctcatcagtg

SEQ ID NO: 15771 - DNA, 15 bp, synthetic construct
  source 1..15: mol_type = other DNA
accttatcccacttc

SEQ ID NO: 15772 - DNA, 15 bp, synthetic construct
  source 1..15: mol_type = other DNA
gtttctagcataaca

SEQ ID NO: 15773 - DNA, 15 bp, synthetic construct
  source 1..15: mol_type = other DNA
tccacaagtgctacg

SEQ ID NO: 15774 - DNA, 15 bp, synthetic construct
  source 1..15: mol_type = other DNA
agttggtattgtttc

SEQ ID NO: 15775 - DNA, 15 bp, synthetic construct
  source 1..15: mol_type = other DNA
acctagccatgaaat

SEQ ID NO: 15776 - DNA, 15 bp, synthetic construct
  source 1..15: mol_type = other DNA
gtcacactttgtgct

SEQ ID NO: 15777 - DNA, 15 bp, synthetic construct
  source 1..15: mol_type = other DNA
atctcccttttctac

SEQ ID NO: 15778 - DNA, 15 bp, synthetic construct
  source 1..15: mol_type = other DNA
tgtgacctgtgagtg

SEQ ID NO: 15779 - DNA, 15 bp, synthetic construct
  source 1..15: mol_type = other DNA
aacagctcttactac

SEQ ID NO: 15780 - DNA, 15 bp, synthetic construct
  source 1..15: mol_type = other DNA
gcttttccccatcgg

SEQ ID NO: 15781 - DNA, 15 bp, synthetic construct
  source 1..15: mol_type = other DNA
atggagaagtcaggc

SEQ ID NO: 15782 - DNA, 15 bp, synthetic construct
  source 1..15: mol_type = other DNA
tagtagctctcttgc

SEQ ID NO: 15783 - DNA, 15 bp, synthetic construct
  source 1..15: mol_type = other DNA
ccccctgtcctctgc

SEQ ID NO: 15784 - DNA, 15 bp, synthetic construct
  source 1..15: mol_type = other DNA
cgggacgcgctgctc

SEQ ID NO: 15785 - DNA, 15 bp, synthetic construct
  source 1..15: mol_type = other DNA
cgagctcggcgtgtc

SEQ ID NO: 15786 - DNA, 15 bp, synthetic construct
  source 1..15: mol_type = other DNA
gggaaggatatgggt

SEQ ID NO: 15787 - DNA, 15 bp, synthetic construct
  source 1..15: mol_type = other DNA
cgtacccggccttgg

SEQ ID NO: 15788 - DNA, 15 bp, synthetic construct
  source 1..15: mol_type = other DNA
ctcagaaattagagc

SEQ ID NO: 15789 - DNA, 15 bp, synthetic construct
  source 1..15: mol_type = other DNA
accgggtgggcattt

SEQ ID NO: 15790 - DNA, 15 bp, synthetic construct
  source 1..15: mol_type = other DNA
cactccgccttgaac

SEQ ID NO: 15791 - DNA, 15 bp, synthetic construct
  source 1..15: mol_type = other DNA
gggcgaggttcacgg

SEQ ID NO: 15792 - DNA, 15 bp, synthetic construct
  source 1..15: mol_type = other DNA
ccatctccaccgcaa

SEQ ID NO: 15793 - DNA, 15 bp, synthetic construct
  source 1..15: mol_type = other DNA
tgacgccttcatttt

SEQ ID NO: 15794 - DNA, 15 bp, synthetic construct
  source 1..15: mol_type = other DNA
acctggatccctcta

SEQ ID NO: 15795 - DNA, 15 bp, synthetic construct
  source 1..15: mol_type = other DNA
gccagtacaaggtcc

SEQ ID NO: 15796 - DNA, 15 bp, synthetic construct
  source 1..15: mol_type = other DNA
tgttgatctcaagcc

SEQ ID NO: 15797 - DNA, 15 bp, synthetic construct
  source 1..15: mol_type = other DNA
cgatcacactagggg

SEQ ID NO: 15798 - DNA, 15 bp, synthetic construct
  source 1..15: mol_type = other DNA
aaaatgaagaagacg

SEQ ID NO: 15799 - DNA, 15 bp, synthetic construct
  source 1..15: mol_type = other DNA
tctgctgctggatac

SEQ ID NO: 15800 - DNA, 15 bp, synthetic construct
  source 1..15: mol_type = other DNA
catggtgcgttatct

SEQ ID NO: 15801 - DNA, 15 bp, synthetic construct
  source 1..15: mol_type = other DNA
taaccatgattagtc

SEQ ID NO: 15802 - DNA, 15 bp, synthetic construct
  source 1..15: mol_type = other DNA
gcatgccgttgtctc

SEQ ID NO: 15803 - DNA, 15 bp, synthetic construct
  source 1..15: mol_type = other DNA
agaacccgttcatct

SEQ ID NO: 15804 - DNA, 15 bp, synthetic construct
  source 1..15: mol_type = other DNA
aggcgtagccgatgt

SEQ ID NO: 15805 - DNA, 15 bp, synthetic construct
  source 1..15: mol_type = other DNA
acggtgccatcaact

SEQ ID NO: 15806 - DNA, 15 bp, synthetic construct
  source 1..15: mol_type = other DNA
tgagtgggcgtccat

SEQ ID NO: 15807 - DNA, 15 bp, synthetic construct
  source 1..15: mol_type = other DNA
acggtgccatcaact

SEQ ID NO: 15808 - DNA, 15 bp, synthetic construct
  source 1..15: mol_type = other DNA
tgagtgggcgtccat

SEQ ID NO: 15809 - DNA, 15 bp, synthetic construct
  source 1..15: mol_type = other DNA
gatcacgctggaagg

SEQ ID NO: 15810 - DNA, 15 bp, synthetic construct
  source 1..15: mol_type = other DNA
agctggaagacagac

SEQ ID NO: 15811 - DNA, 15 bp, synthetic construct
  source 1..15: mol_type = other DNA
ggcgaatcagagact

SEQ ID NO: 15812 - DNA, 15 bp, synthetic construct
  source 1..15: mol_type = other DNA
gaccttgcggaatat

SEQ ID NO: 15813 - DNA, 15 bp, synthetic construct
  source 1..15: mol_type = other DNA
tggcagctgctacga

SEQ ID NO: 15814 - DNA, 15 bp, synthetic construct
  source 1..15: mol_type = other DNA
catggctgaaatggt

SEQ ID NO: 15815 - DNA, 15 bp, synthetic construct
  source 1..15: mol_type = other DNA
cctcggtgcaccacc

SEQ ID NO: 15816 - DNA, 15 bp, synthetic construct
  source 1..15: mol_type = other DNA
cctgcggcccctcta

SEQ ID NO: 15817 - DNA, 15 bp, synthetic construct
  source 1..15: mol_type = other DNA
gtgcacagcatctac

SEQ ID NO: 15818 - DNA, 15 bp, synthetic construct
  source 1..15: mol_type = other DNA
gatcagggctgttca

SEQ ID NO: 15819 - DNA, 15 bp, synthetic construct
  source 1..15: mol_type = other DNA
accccacgatcctgc

SEQ ID NO: 15820 - DNA, 15 bp, synthetic construct
  source 1..15: mol_type = other DNA
gtgcccacaatgggt

SEQ ID NO: 15821 - DNA, 15 bp, synthetic construct
  source 1..15: mol_type = other DNA
cagtcacaggttctg

SEQ ID NO: 15822 - DNA, 15 bp, synthetic construct
  source 1..15: mol_type = other DNA
cacgggtgcagtacg

SEQ ID NO: 15823 - DNA, 15 bp, synthetic construct
  source 1..15: mol_type = other DNA
cctgtgagctgaaga

SEQ ID NO: 15824 - DNA, 15 bp, synthetic construct
  source 1..15: mol_type = other DNA
acgtcctgcgtgaat

SEQ ID NO: 15825 - DNA, 15 bp, synthetic construct
  source 1..15: mol_type = other DNA
gtggagactcagatg

SEQ ID NO: 15826 - DNA, 15 bp, synthetic construct
  source 1..15: mol_type = other DNA
caaggatggccatca

SEQ ID NO: 15827 - DNA, 15 bp, synthetic construct
  source 1..15: mol_type = other DNA
agcaagtacttcagc

SEQ ID NO: 15828 - DNA, 15 bp, synthetic construct
  source 1..15: mol_type = other DNA
cctatcctcaccatc

SEQ ID NO: 15829 - DNA, 15 bp, synthetic construct
  source 1..15: mol_type = other DNA
aactgtccccacctc

SEQ ID NO: 15830 - DNA, 15 bp, synthetic construct
  source 1..15: mol_type = other DNA
gtgctctgggttttg

SEQ ID NO: 15831 - DNA, 15 bp, synthetic construct
  source 1..15: mol_type = other DNA
ttccagtgggacgag

SEQ ID NO: 15832 - DNA, 15 bp, synthetic construct
  source 1..15: mol_type = other DNA
gcgcccacctgaaga

SEQ ID NO: 15833 - DNA, 15 bp, synthetic construct
  source 1..15: mol_type = other DNA
ggacaacgtggctac

SEQ ID NO: 15834 - DNA, 15 bp, synthetic construct
  source 1..15: mol_type = other DNA
gcttctcaaatgaag

SEQ ID NO: 15835 - DNA, 15 bp, synthetic construct
  source 1..15: mol_type = other DNA
aagtcccttttaagc

SEQ ID NO: 15836 - DNA, 15 bp, synthetic construct
  source 1..15: mol_type = other DNA
aagttcttcctgtca

SEQ ID NO: 15837 - DNA, 15 bp, synthetic construct
  source 1..15: mol_type = other DNA
catgcaccttttcgg

SEQ ID NO: 15838 - DNA, 15 bp, synthetic construct
  source 1..15: mol_type = other DNA
gcagctatggatgcg

SEQ ID NO: 15839 - DNA, 15 bp, synthetic construct
  source 1..15: mol_type = other DNA
ttgccggcatttcgg

SEQ ID NO: 15840 - DNA, 15 bp, synthetic construct
  source 1..15: mol_type = other DNA
ccgtctctcttctca

SEQ ID NO: 15841 - DNA, 15 bp, synthetic construct
  source 1..15: mol_type = other DNA
agattcctcacctac

SEQ ID NO: 15842 - DNA, 15 bp, synthetic construct
  source 1..15: mol_type = other DNA
agttctctgagcttg

SEQ ID NO: 15843 - DNA, 15 bp, synthetic construct
  source 1..15: mol_type = other DNA
gtttagggcgatgcc

SEQ ID NO: 15844 - DNA, 15 bp, synthetic construct
  source 1..15: mol_type = other DNA
ggaacacatcttcag

SEQ ID NO: 15845 - DNA, 15 bp, synthetic construct
  source 1..15: mol_type = other DNA
gtttagggcgatgcc

SEQ ID NO: 15846 - DNA, 15 bp, synthetic construct
  source 1..15: mol_type = other DNA
ggaacacatcttcag

SEQ ID NO: 15847 - DNA, 15 bp, synthetic construct
  source 1..15: mol_type = other DNA
gcctggcagctctag

SEQ ID NO: 15848 - DNA, 15 bp, synthetic construct
  source 1..15: mol_type = other DNA
gagatggtccctacc

SEQ ID NO: 15849 - DNA, 15 bp, synthetic construct
  source 1..15: mol_type = other DNA
caccattcctggatg

SEQ ID NO: 15850 - DNA, 15 bp, synthetic construct
  source 1..15: mol_type = other DNA
ccggaaaccagaaca

SEQ ID NO: 15851 - DNA, 15 bp, synthetic construct
  source 1..15: mol_type = other DNA
aggtcactgactccc

SEQ ID NO: 15852 - DNA, 15 bp, synthetic construct
  source 1..15: mol_type = other DNA
gggtccagggactcg

SEQ ID NO: 15853 - DNA, 15 bp, synthetic construct
  source 1..15: mol_type = other DNA
gagtccctgctgtct

SEQ ID NO: 15854 - DNA, 15 bp, synthetic construct
  source 1..15: mol_type = other DNA
ccacgcactcacgtc

SEQ ID NO: 15855 - DNA, 15 bp, synthetic construct
  source 1..15: mol_type = other DNA
cttcctgcgcatcga

SEQ ID NO: 15856 - DNA, 15 bp, synthetic construct
  source 1..15: mol_type = other DNA
aatcccctcagtcaa

SEQ ID NO: 15857 - DNA, 15 bp, synthetic construct
  source 1..15: mol_type = other DNA
ggagtgaggatggag

SEQ ID NO: 15858 - DNA, 15 bp, synthetic construct
  source 1..15: mol_type = other DNA
gaactagccatgcag

SEQ ID NO: 15859 - DNA, 15 bp, synthetic construct
  source 1..15: mol_type = other DNA
atggtggatatttcc

SEQ ID NO: 15860 - DNA, 15 bp, synthetic construct
  source 1..15: mol_type = other DNA
ggaccacgtgatcaa

SEQ ID NO: 15861 - DNA, 15 bp, synthetic construct
  source 1..15: mol_type = other DNA
ggtcatcacacacaa

SEQ ID NO: 15862 - DNA, 15 bp, synthetic construct
  source 1..15: mol_type = other DNA
ccttcaccatcatct

SEQ ID NO: 15863 - DNA, 15 bp, synthetic construct
  source 1..15: mol_type = other DNA
ggtcatcacacacaa

SEQ ID NO: 15864 - DNA, 15 bp, synthetic construct
  source 1..15: mol_type = other DNA
ccttcaccatcatct

SEQ ID NO: 15865 - DNA, 15 bp, synthetic construct
  source 1..15: mol_type = other DNA
gtcttcctcagcgtc

SEQ ID NO: 15866 - DNA, 15 bp, synthetic construct
  source 1..15: mol_type = other DNA
tccagcaggttccag

SEQ ID NO: 15867 - DNA, 15 bp, synthetic construct
  source 1..15: mol_type = other DNA
gtcttcctcagcgtc

SEQ ID NO: 15868 - DNA, 15 bp, synthetic construct
  source 1..15: mol_type = other DNA
tccagcaggttccag

SEQ ID NO: 15869 - DNA, 15 bp, synthetic construct
  source 1..15: mol_type = other DNA
ggccctccgcaggtg

SEQ ID NO: 15870 - DNA, 15 bp, synthetic construct
  source 1..15: mol_type = other DNA
agtaatgggcagtgg

SEQ ID NO: 15871 - DNA, 15 bp, synthetic construct
  source 1..15: mol_type = other DNA
agtgtatccttcact

SEQ ID NO: 15872 - DNA, 15 bp, synthetic construct
  source 1..15: mol_type = other DNA
gaggcccgagctgtc

SEQ ID NO: 15873 - DNA, 15 bp, synthetic construct
  source 1..15: mol_type = other DNA
tcgggcctcactcgc

SEQ ID NO: 15874 - DNA, 15 bp, synthetic construct
  source 1..15: mol_type = other DNA
ttgtcgaagttgtac

SEQ ID NO: 15875 - DNA, 15 bp, synthetic construct
  source 1..15: mol_type = other DNA
cactaccgctgggtg

SEQ ID NO: 15876 - DNA, 15 bp, synthetic construct
  source 1..15: mol_type = other DNA
gctcgacccgcctgt

SEQ ID NO: 15877 - DNA, 15 bp, synthetic construct
  source 1..15: mol_type = other DNA
cactaccgctgggtg

SEQ ID NO: 15878 - DNA, 15 bp, synthetic construct
  source 1..15: mol_type = other DNA
gctcgacccgcctgt

SEQ ID NO: 15879 - DNA, 15 bp, synthetic construct
  source 1..15: mol_type = other DNA
ggcgggtcgagctgg

SEQ ID NO: 15880 - DNA, 15 bp, synthetic construct
  source 1..15: mol_type = other DNA
ttgtggaagttctcg

SEQ ID NO: 15881 - DNA, 15 bp, synthetic construct
  source 1..15: mol_type = other DNA
ttcgtgggcgtcgtg

SEQ ID NO: 15882 - DNA, 15 bp, synthetic construct
  source 1..15: mol_type = other DNA
gcgtgcagagccatt

SEQ ID NO: 15883 - DNA, 15 bp, synthetic construct
  source 1..15: mol_type = other DNA
ccaccgagtcctcac

SEQ ID NO: 15884 - DNA, 15 bp, synthetic construct
  source 1..15: mol_type = other DNA
ggatgcccgcccttc

SEQ ID NO: 15885 - DNA, 15 bp, synthetic construct
  source 1..15: mol_type = other DNA
ggagaatggagtctg

SEQ ID NO: 15886 - DNA, 15 bp, synthetic construct
  source 1..15: mol_type = other DNA
ggttggttatagtgc

SEQ ID NO: 15887 - DNA, 15 bp, synthetic construct
  source 1..15: mol_type = other DNA
ttcatcatctgtgtc

SEQ ID NO: 15888 - DNA, 15 bp, synthetic construct
  source 1..15: mol_type = other DNA
ttaaaagacccgtgt

SEQ ID NO: 15889 - DNA, 15 bp, synthetic construct
  source 1..15: mol_type = other DNA
ctactgagctgacct

SEQ ID NO: 15890 - DNA, 15 bp, synthetic construct
  source 1..15: mol_type = other DNA
acacctgtccttgaa

SEQ ID NO: 15891 - DNA, 15 bp, synthetic construct
  source 1..15: mol_type = other DNA
gcatttgggttccgt

SEQ ID NO: 15892 - DNA, 15 bp, synthetic construct
  source 1..15: mol_type = other DNA
catctctatctcctc

SEQ ID NO: 15893 - DNA, 15 bp, synthetic construct
  source 1..15: mol_type = other DNA
gcatttgggttccgt

SEQ ID NO: 15894 - DNA, 15 bp, synthetic construct
  source 1..15: mol_type = other DNA
catctctatctcctc

SEQ ID NO: 15895 - DNA, 15 bp, synthetic construct
  source 1..15: mol_type = other DNA
tcatgggcatcacgc

SEQ ID NO: 15896 - DNA, 15 bp, synthetic construct
  source 1..15: mol_type = other DNA
cttcagcagcttcag

SEQ ID NO: 15897 - DNA, 15 bp, synthetic construct
  source 1..15: mol_type = other DNA
tcatgggcatcacgc

SEQ ID NO: 15898 - DNA, 15 bp, synthetic construct
  source 1..15: mol_type = other DNA
cttcagcagcttcag

SEQ ID NO: 15899 - DNA, 15 bp, synthetic construct
  source 1..15: mol_type = other DNA
tctctgcgggtggag

SEQ ID NO: 15900 - DNA, 15 bp, synthetic construct
  source 1..15: mol_type = other DNA
ggcgctccctgcaac

SEQ ID NO: 15901 - DNA, 15 bp, synthetic construct
  source 1..15: mol_type = other DNA
gaacttgcttccact

SEQ ID NO: 15902 - DNA, 15 bp, synthetic construct
  source 1..15: mol_type = other DNA
agcgcagcatagata

SEQ ID NO: 15903 - DNA, 15 bp, synthetic construct
  source 1..15: mol_type = other DNA
ctctcttgtgtaggt

SEQ ID NO: 15904 - DNA, 15 bp, synthetic construct
  source 1..15: mol_type = other DNA
tatttgcaagcatgt

SEQ ID NO: 15905 - DNA, 15 bp, synthetic construct
  source 1..15: mol_type = other DNA
agggcctcgtcatcc

SEQ ID NO: 15906 - DNA, 15 bp, synthetic construct
  source 1..15: mol_type = other DNA
gcggcgggtaccttc

SEQ ID NO: 15907 - DNA, 15 bp, synthetic construct
  source 1..15: mol_type = other DNA
ctgttccgcgtgtcc

SEQ ID NO: 15908 - DNA, 15 bp, synthetic construct
  source 1..15: mol_type = other DNA
ccggcaggtagctca

SEQ ID NO: 15909 - DNA, 15 bp, synthetic construct
  source 1..15: mol_type = other DNA
ctgttccgcgtgtcc

SEQ ID NO: 15910 - DNA, 15 bp, synthetic construct
  source 1..15: mol_type = other DNA
ccggcaggtagctca

SEQ ID NO: 15911 - DNA, 15 bp, synthetic construct
  source 1..15: mol_type = other DNA
acgctgcgcgagtgc

SEQ ID NO: 15912 - DNA, 15 bp, synthetic construct
  source 1..15: mol_type = other DNA
gcctgtccgcgtcca

SEQ ID NO: 15913 - DNA, 15 bp, synthetic construct
  source 1..15: mol_type = other DNA
atcgagctggagatg

SEQ ID NO: 15914 - DNA, 15 bp, synthetic construct
  source 1..15: mol_type = other DNA
gctaccatacccaag

SEQ ID NO: 15915 - DNA, 15 bp, synthetic construct
  source 1..15: mol_type = other DNA
aacgacagctacatg

SEQ ID NO: 15916 - DNA, 15 bp, synthetic construct
  source 1..15: mol_type = other DNA
tcttcctgctggcta

SEQ ID NO: 15917 - DNA, 15 bp, synthetic construct
  source 1..15: mol_type = other DNA
agcttagattcttcc

SEQ ID NO: 15918 - DNA, 15 bp, synthetic construct
  source 1..15: mol_type = other DNA
tgagacgaggcatcc

SEQ ID NO: 15919 - DNA, 15 bp, synthetic construct
  source 1..15: mol_type = other DNA
ctttgactctacgcc

SEQ ID NO: 15920 - DNA, 15 bp, synthetic construct
  source 1..15: mol_type = other DNA
acgagtgcggacgct

SEQ ID NO: 15921 - DNA, 15 bp, synthetic construct
  source 1..15: mol_type = other DNA
gaagggaagattgac

SEQ ID NO: 15922 - DNA, 15 bp, synthetic construct
  source 1..15: mol_type = other DNA
ggctgacctcctcgt

SEQ ID NO: 15923 - DNA, 15 bp, synthetic construct
  source 1..15: mol_type = other DNA
taccttcggacagcg

SEQ ID NO: 15924 - DNA, 15 bp, synthetic construct
  source 1..15: mol_type = other DNA
ccgccactgctcgtc

SEQ ID NO: 15925 - DNA, 15 bp, synthetic construct
  source 1..15: mol_type = other DNA
ctgcgcaggctctac

SEQ ID NO: 15926 - DNA, 15 bp, synthetic construct
  source 1..15: mol_type = other DNA
cctgcgcctcagtgt

SEQ ID NO: 15927 - DNA, 15 bp, synthetic construct
  source 1..15: mol_type = other DNA
tgcatctcggtggaa

SEQ ID NO: 15928 - DNA, 15 bp, synthetic construct
  source 1..15: mol_type = other DNA
ggtccagcggctcaa

SEQ ID NO: 15929 - DNA, 15 bp, synthetic construct
  source 1..15: mol_type = other DNA
gagcacctgaccgtc

SEQ ID NO: 15930 - DNA, 15 bp, synthetic construct
  source 1..15: mol_type = other DNA
cctggtttctccaga

SEQ ID NO: 15931 - DNA, 15 bp, synthetic construct
  source 1..15: mol_type = other DNA
cccccagaatcagag

SEQ ID NO: 15932 - DNA, 15 bp, synthetic construct
  source 1..15: mol_type = other DNA
ctttctgctcacgac

SEQ ID NO: 15933 - DNA, 15 bp, synthetic construct
  source 1..15: mol_type = other DNA
gcagcacgctggtcc

SEQ ID NO: 15934 - DNA, 15 bp, synthetic construct
  source 1..15: mol_type = other DNA
aatgtctgctcctct

SEQ ID NO: 15935 - DNA, 15 bp, synthetic construct
  source 1..15: mol_type = other DNA
gtttcaggagccttg

SEQ ID NO: 15936 - DNA, 15 bp, synthetic construct
  source 1..15: mol_type = other DNA
acctctgatagcagt

SEQ ID NO: 15937 - DNA, 15 bp, synthetic construct
  source 1..15: mol_type = other DNA
tgtagtcacatctgc

SEQ ID NO: 15938 - DNA, 15 bp, synthetic construct
  source 1..15: mol_type = other DNA
cttgacgggtttcat

SEQ ID NO: 15939 - DNA, 15 bp, synthetic construct
  source 1..15: mol_type = other DNA
atgaaacccgtcaag

SEQ ID NO: 15940 - DNA, 15 bp, synthetic construct
  source 1..15: mol_type = other DNA
gaaaatcacgttctt

SEQ ID NO: 15941 - DNA, 15 bp, synthetic construct
  source 1..15: mol_type = other DNA
actgcaggtagttag

SEQ ID NO: 15942 - DNA, 15 bp, synthetic construct
  source 1..15: mol_type = other DNA
accactaagatctct

SEQ ID NO: 15943 - DNA, 15 bp, synthetic construct
  source 1..15: mol_type = other DNA
ctgcctgtgaggtag

SEQ ID NO: 15944 - DNA, 15 bp, synthetic construct
  source 1..15: mol_type = other DNA
ttgcagtatcaggaa

SEQ ID NO: 15945 - DNA, 15 bp, synthetic construct
  source 1..15: mol_type = other DNA
tcggtgatgctcatg

SEQ ID NO: 15946 - DNA, 15 bp, synthetic construct
  source 1..15: mol_type = other DNA
gaatgttaacagcgt

SEQ ID NO: 15947 - DNA, 15 bp, synthetic construct
  source 1..15: mol_type = other DNA
ggagaactcataacc

SEQ ID NO: 15948 - DNA, 15 bp, synthetic construct
  source 1..15: mol_type = other DNA
ggacctggatgagac

SEQ ID NO: 15949 - DNA, 15 bp, synthetic construct
  source 1..15: mol_type = other DNA
gctcgatgaagaagt

SEQ ID NO: 15950 - DNA, 15 bp, synthetic construct
  source 1..15: mol_type = other DNA
agcccaccgtatccg

SEQ ID NO: 15951 - DNA, 15 bp, synthetic construct
  source 1..15: mol_type = other DNA
gtagggccacaaact

SEQ ID NO: 15952 - DNA, 15 bp, synthetic construct
  source 1..15: mol_type = other DNA
ctacgaggagaaggg

SEQ ID NO: 15953 - DNA, 15 bp, synthetic construct
  source 1..15: mol_type = other DNA
gtagggccacaaact

SEQ ID NO: 15954 - DNA, 15 bp, synthetic construct
  source 1..15: mol_type = other DNA
ctacgaggagaaggg

SEQ ID NO: 15955 - DNA, 15 bp, synthetic construct
  source 1..15: mol_type = other DNA
tggtacagcatgacc

SEQ ID NO: 15956 - DNA, 15 bp, synthetic construct
  source 1..15: mol_type = other DNA
cccatcaccgcagag

SEQ ID NO: 15957 - DNA, 15 bp, synthetic construct
  source 1..15: mol_type = other DNA
cacttttccacttga

SEQ ID NO: 15958 - DNA, 15 bp, synthetic construct
  source 1..15: mol_type = other DNA
ctttgggttctttgt

SEQ ID NO: 15959 - DNA, 15 bp, synthetic construct
  source 1..15: mol_type = other DNA
cagcctagaaagaca

SEQ ID NO: 15960 - DNA, 15 bp, synthetic construct
  source 1..15: mol_type = other DNA
tggagaatccatggt

SEQ ID NO: 15961 - DNA, 15 bp, synthetic construct
  source 1..15: mol_type = other DNA
gtgcatgtcacctga

SEQ ID NO: 15962 - DNA, 15 bp, synthetic construct
  source 1..15: mol_type = other DNA
ggagctctacgtgaa

SEQ ID NO: 15963 - DNA, 15 bp, synthetic construct
  source 1..15: mol_type = other DNA
ttatccttcatttta

SEQ ID NO: 15964 - DNA, 15 bp, synthetic construct
  source 1..15: mol_type = other DNA
tctgatgcgtttcac

SEQ ID NO: 15965 - DNA, 15 bp, synthetic construct
  source 1..15: mol_type = other DNA
cctcctctaagaacc

SEQ ID NO: 15966 - DNA, 15 bp, synthetic construct
  source 1..15: mol_type = other DNA
ctgaacaagttctac

SEQ ID NO: 15967 - DNA, 15 bp, synthetic construct
  source 1..15: mol_type = other DNA
ctcactaactgaggg

SEQ ID NO: 15968 - DNA, 15 bp, synthetic construct
  source 1..15: mol_type = other DNA
gaacagtgtgtttga

SEQ ID NO: 15969 - DNA, 15 bp, synthetic construct
  source 1..15: mol_type = other DNA
cagtgcaggctcagg

SEQ ID NO: 15970 - DNA, 15 bp, synthetic construct
  source 1..15: mol_type = other DNA
catggcgcgcatgtg

SEQ ID NO: 15971 - DNA, 15 bp, synthetic construct
  source 1..15: mol_type = other DNA
catggcgcgcatgtg

SEQ ID NO: 15972 - DNA, 15 bp, synthetic construct
  source 1..15: mol_type = other DNA
tcctcatgcccgttt

SEQ ID NO: 15973 - DNA, 15 bp, synthetic construct
  source 1..15: mol_type = other DNA
atcgagtgggaagac

SEQ ID NO: 15974 - DNA, 15 bp, synthetic construct
  source 1..15: mol_type = other DNA
tctttgtcaccatag

SEQ ID NO: 15975 - DNA, 15 bp, synthetic construct
  source 1..15: mol_type = other DNA
ttgatgagcttgatg

SEQ ID NO: 15976 - DNA, 15 bp, synthetic construct
  source 1..15: mol_type = other DNA
acacatgggtccttt

SEQ ID NO: 15977 - DNA, 15 bp, synthetic construct
  source 1..15: mol_type = other DNA
taactcacatttcag

SEQ ID NO: 15978 - DNA, 15 bp, synthetic construct
  source 1..15: mol_type = other DNA
tgatcctgtccttct

SEQ ID NO: 15979 - DNA, 15 bp, synthetic construct
  source 1..15: mol_type = other DNA
acctttcttgtgaag

SEQ ID NO: 15980 - DNA, 15 bp, synthetic construct
  source 1..15: mol_type = other DNA
aaatggcactcatac

SEQ ID NO: 15981 - DNA, 15 bp, synthetic construct
  source 1..15: mol_type = other DNA
gtcaaatggccactg

SEQ ID NO: 15982 - DNA, 15 bp, synthetic construct
  source 1..15: mol_type = other DNA
taggagccacctctt

SEQ ID NO: 15983 - DNA, 15 bp, synthetic construct
  source 1..15: mol_type = other DNA
gttcacgggaacata

SEQ ID NO: 15984 - DNA, 15 bp, synthetic construct
  source 1..15: mol_type = other DNA
ccagttgttaaaatc

SEQ ID NO: 15985 - DNA, 15 bp, synthetic construct
  source 1..15: mol_type = other DNA
taagaactccaatct

SEQ ID NO: 15986 - DNA, 15 bp, synthetic construct
  source 1..15: mol_type = other DNA
gtgaccgtctttgac

SEQ ID NO: 15987 - DNA, 15 bp, synthetic construct
  source 1..15: mol_type = other DNA
ttaaaggacagcgtc

SEQ ID NO: 15988 - DNA, 15 bp, synthetic construct
  source 1..15: mol_type = other DNA
agtccttggaagatg

SEQ ID NO: 15989 - DNA, 15 bp, synthetic construct
  source 1..15: mol_type = other DNA
gtgggcgagtggacg

SEQ ID NO: 15990 - DNA, 15 bp, synthetic construct
  source 1..15: mol_type = other DNA
gtgagaagcagccta

SEQ ID NO: 15991 - DNA, 15 bp, synthetic construct
  source 1..15: mol_type = other DNA
gcatgtcggtgttaa

SEQ ID NO: 15992 - DNA, 15 bp, synthetic construct
  source 1..15: mol_type = other DNA
aactcctccttttct

SEQ ID NO: 15993 - DNA, 15 bp, synthetic construct
  source 1..15: mol_type = other DNA
gatcaaagcttttaa

SEQ ID NO: 15994 - DNA, 15 bp, synthetic construct
  source 1..15: mol_type = other DNA
gtacaaggttatctg

SEQ ID NO: 15995 - DNA, 15 bp, synthetic construct
  source 1..15: mol_type = other DNA
acaggctttgtctca

SEQ ID NO: 15996 - DNA, 15 bp, synthetic construct
  source 1..15: mol_type = other DNA
ggatcgtgtgtggga

SEQ ID NO: 15997 - DNA, 15 bp, synthetic construct
  source 1..15: mol_type = other DNA
aagccaggtagtggg

SEQ ID NO: 15998 - DNA, 15 bp, synthetic construct
  source 1..15: mol_type = other DNA
tgatctcatagtcgt

SEQ ID NO: 15999 - DNA, 15 bp, synthetic construct
  source 1..15: mol_type = other DNA
atggaactgagagtg

SEQ ID NO: 16000 - DNA, 15 bp, synthetic construct
  source 1..15: mol_type = other DNA
tcacacttccaccag

SEQ ID NO: 16001 - DNA, 15 bp, synthetic construct
  source 1..15: mol_type = other DNA
ctgatgtgcatgtcg

SEQ ID NO: 16002 - DNA, 15 bp, synthetic construct
  source 1..15: mol_type = other DNA
ttctcctgaccgcat

SEQ ID NO: 16003 - DNA, 15 bp, synthetic construct
  source 1..15: mol_type = other DNA
agcagaaaatgagtg

SEQ ID NO: 16004 - DNA, 15 bp, synthetic construct
  source 1..15: mol_type = other DNA
cagagcttgttgctg

SEQ ID NO: 16005 - DNA, 15 bp, synthetic construct
  source 1..15: mol_type = other DNA
ccgactatttgaatg

SEQ ID NO: 16006 - DNA, 15 bp, synthetic construct
  source 1..15: mol_type = other DNA
ttctgttgtagattc

SEQ ID NO: 16007 - DNA, 15 bp, synthetic construct
  source 1..15: mol_type = other DNA
acctttgactttaca

SEQ ID NO: 16008 - DNA, 15 bp, synthetic construct
  source 1..15: mol_type = other DNA
taacagcagtgttcg

SEQ ID NO: 16009 - DNA, 15 bp, synthetic construct
  source 1..15: mol_type = other DNA
ctgacttagaggagc

SEQ ID NO: 16010 - DNA, 15 bp, synthetic construct
  source 1..15: mol_type = other DNA
tgaagtcactgagga

SEQ ID NO: 16011 - DNA, 15 bp, synthetic construct
  source 1..15: mol_type = other DNA
ccagaagagaaaggg

SEQ ID NO: 16012 - DNA, 15 bp, synthetic construct
  source 1..15: mol_type = other DNA
tatgtggatgagaag

SEQ ID NO: 16013 - DNA, 15 bp, synthetic construct
  source 1..15: mol_type = other DNA
tagaacagcatctga

SEQ ID NO: 16014 - DNA, 15 bp, synthetic construct
  source 1..15: mol_type = other DNA
ttttaagttcttata

SEQ ID NO: 16015 - DNA, 15 bp, synthetic construct
  source 1..15: mol_type = other DNA
tgtgagtttaaaatc

SEQ ID NO: 16016 - DNA, 15 bp, synthetic construct
  source 1..15: mol_type = other DNA
aagaatcttgcttcg

SEQ ID NO: 16017 - DNA, 15 bp, synthetic construct
  source 1..15: mol_type = other DNA
gccactcctacagca

SEQ ID NO: 16018 - DNA, 15 bp, synthetic construct
  source 1..15: mol_type = other DNA
taacacgtggtgttg

SEQ ID NO: 16019 - DNA, 15 bp, synthetic construct
  source 1..15: mol_type = other DNA
aagggtcaaggtctg

SEQ ID NO: 16020 - DNA, 15 bp, synthetic construct
  source 1..15: mol_type = other DNA
gatacacacgtcgag

SEQ ID NO: 16021 - DNA, 15 bp, synthetic construct
  source 1..15: mol_type = other DNA
tgcttgttaaacacc

SEQ ID NO: 16022 - DNA, 15 bp, synthetic construct
  source 1..15: mol_type = other DNA
aaagtagctgtccct

SEQ ID NO: 16023 - DNA, 15 bp, synthetic construct
  source 1..15: mol_type = other DNA
agccagaagctacca

SEQ ID NO: 16024 - DNA, 15 bp, synthetic construct
  source 1..15: mol_type = other DNA
tggccctctattatg

SEQ ID NO: 16025 - DNA, 15 bp, synthetic construct
  source 1..15: mol_type = other DNA
tccaggtaaatatcc

SEQ ID NO: 16026 - DNA, 15 bp, synthetic construct
  source 1..15: mol_type = other DNA
cttttcgtcattcca

SEQ ID NO: 16027 - DNA, 15 bp, synthetic construct
  source 1..15: mol_type = other DNA
ccattcctgtttcgt

SEQ ID NO: 16028 - DNA, 15 bp, synthetic construct
  source 1..15: mol_type = other DNA
tctagcctagcaaag

SEQ ID NO: 16029 - DNA, 15 bp, synthetic construct
  source 1..15: mol_type = other DNA
gggagtctttaggtg

SEQ ID NO: 16030 - DNA, 15 bp, synthetic construct
  source 1..15: mol_type = other DNA
caaccatgttcctaa

SEQ ID NO: 16031 - DNA, 15 bp, synthetic construct
  source 1..15: mol_type = other DNA
cacaagcccccgttg

SEQ ID NO: 16032 - DNA, 15 bp, synthetic construct
  source 1..15: mol_type = other DNA
gtgggcagcctgacg

SEQ ID NO: 16033 - DNA, 15 bp, synthetic construct
  source 1..15: mol_type = other DNA
gtgggcagcctgacg

SEQ ID NO: 16034 - DNA, 15 bp, synthetic construct
  source 1..15: mol_type = other DNA
cgtcaaggccagaga

SEQ ID NO: 16035 - DNA, 15 bp, synthetic construct
  source 1..15: mol_type = other DNA
gagatgtagattcgg

SEQ ID NO: 16036 - DNA, 15 bp, synthetic construct
  source 1..15: mol_type = other DNA
aactttattcactgc

SEQ ID NO: 16037 - DNA, 15 bp, synthetic construct
  source 1..15: mol_type = other DNA
gccatgcgtgttatt

SEQ ID NO: 16038 - DNA, 15 bp, synthetic construct
  source 1..15: mol_type = other DNA
aaaccagggtgaaat

SEQ ID NO: 16039 - DNA, 15 bp, synthetic construct
  source 1..15: mol_type = other DNA
cagggacgtcaggtg

SEQ ID NO: 16040 - DNA, 15 bp, synthetic construct
  source 1..15: mol_type = other DNA
gcgacagagggtaac

SEQ ID NO: 16041 - DNA, 15 bp, synthetic construct
  source 1..15: mol_type = other DNA
gtctgctacaactgc

SEQ ID NO: 16042 - DNA, 15 bp, synthetic construct
  source 1..15: mol_type = other DNA
ctgacctcagctcaa

SEQ ID NO: 16043 - DNA, 15 bp, synthetic construct
  source 1..15: mol_type = other DNA
tggcattttgagaac

SEQ ID NO: 16044 - DNA, 15 bp, synthetic construct
  source 1..15: mol_type = other DNA
gtggcacatgttgta

SEQ ID NO: 16045 - DNA, 15 bp, synthetic construct
  source 1..15: mol_type = other DNA
tctcgcagctgatgc

SEQ ID NO: 16046 - DNA, 15 bp, synthetic construct
  source 1..15: mol_type = other DNA
aggactctctaagcc

SEQ ID NO: 16047 - DNA, 15 bp, synthetic construct
  source 1..15: mol_type = other DNA
attccgtctctctgg

SEQ ID NO: 16048 - DNA, 15 bp, synthetic construct
  source 1..15: mol_type = other DNA
cttacctggtaaaat

SEQ ID NO: 16049 - DNA, 15 bp, synthetic construct
  source 1..15: mol_type = other DNA
ttagagcctacatgg

SEQ ID NO: 16050 - DNA, 15 bp, synthetic construct
  source 1..15: mol_type = other DNA
aaaggcctagaaatg

SEQ ID NO: 16051 - DNA, 15 bp, synthetic construct
  source 1..15: mol_type = other DNA
gctggagcatgtaga

SEQ ID NO: 16052 - DNA, 15 bp, synthetic construct
  source 1..15: mol_type = other DNA
ttcctatacttcttg

SEQ ID NO: 16053 - DNA, 15 bp, synthetic construct
  source 1..15: mol_type = other DNA
gtcctatgagatcgt

SEQ ID NO: 16054 - DNA, 15 bp, synthetic construct
  source 1..15: mol_type = other DNA
accatcttctgagtg

SEQ ID NO: 16055 - DNA, 15 bp, synthetic construct
  source 1..15: mol_type = other DNA
atcgtgcctggtact

SEQ ID NO: 16056 - DNA, 15 bp, synthetic construct
  source 1..15: mol_type = other DNA
accagttcaaagtat

SEQ ID NO: 16057 - DNA, 15 bp, synthetic construct
  source 1..15: mol_type = other DNA
ccagaacgagttcca

SEQ ID NO: 16058 - DNA, 15 bp, synthetic construct
  source 1..15: mol_type = other DNA
ccccgagcttgttac

SEQ ID NO: 16059 - DNA, 15 bp, synthetic construct
  source 1..15: mol_type = other DNA
gtttggacacaagtc

SEQ ID NO: 16060 - DNA, 15 bp, synthetic construct
  source 1..15: mol_type = other DNA
atccagccgtccttg

SEQ ID NO: 16061 - DNA, 15 bp, synthetic construct
  source 1..15: mol_type = other DNA
acctgatctcctata

SEQ ID NO: 16062 - DNA, 15 bp, synthetic construct
  source 1..15: mol_type = other DNA
ctggaaagcaagcta

SEQ ID NO: 16063 - DNA, 15 bp, synthetic construct
  source 1..15: mol_type = other DNA
gctccctcttttcgg

SEQ ID NO: 16064 - DNA, 15 bp, synthetic construct
  source 1..15: mol_type = other DNA
cgcacctcatagaac

SEQ ID NO: 16065 - DNA, 15 bp, synthetic construct
  source 1..15: mol_type = other DNA
tgctgctcatcaaca

SEQ ID NO: 16066 - DNA, 15 bp, synthetic construct
  source 1..15: mol_type = other DNA
ggccacgtgtcaagg

SEQ ID NO: 16067 - DNA, 15 bp, synthetic construct
  source 1..15: mol_type = other DNA
tggaagtgtcacgag

SEQ ID NO: 16068 - DNA, 15 bp, synthetic construct
  source 1..15: mol_type = other DNA
tctcgatgatgtcca

SEQ ID NO: 16069 - DNA, 15 bp, synthetic construct
  source 1..15: mol_type = other DNA
aggagctgattaact

SEQ ID NO: 16070 - DNA, 15 bp, synthetic construct
  source 1..15: mol_type = other DNA
cggtcactcgaagag

SEQ ID NO: 16071 - DNA, 15 bp, synthetic construct
  source 1..15: mol_type = other DNA
gtgtgtaagtcctgg

SEQ ID NO: 16072 - DNA, 15 bp, synthetic construct
  source 1..15: mol_type = other DNA
aacacaacgcagatg

SEQ ID NO: 16073 - DNA, 15 bp, synthetic construct
  source 1..15: mol_type = other DNA
tgggtttgaaggtcg

SEQ ID NO: 16074 - DNA, 15 bp, synthetic construct
  source 1..15: mol_type = other DNA
atgctgctcgcgatt

SEQ ID NO: 16075 - DNA, 15 bp, synthetic construct
  source 1..15: mol_type = other DNA
agcacagctacaccc

SEQ ID NO: 16076 - DNA, 15 bp, synthetic construct
  source 1..15: mol_type = other DNA
ccgtgcggcttagag

SEQ ID NO: 16077 - DNA, 15 bp, synthetic construct
  source 1..15: mol_type = other DNA
ttcaccatcctcttc

SEQ ID NO: 16078 - DNA, 15 bp, synthetic construct
  source 1..15: mol_type = other DNA
aacagacttggctct

SEQ ID NO: 16079 - DNA, 15 bp, synthetic construct
  source 1..15: mol_type = other DNA
gaagagccaagtctg

SEQ ID NO: 16080 - DNA, 15 bp, synthetic construct
  source 1..15: mol_type = other DNA
cctcctggcccaacg

SEQ ID NO: 16081 - DNA, 15 bp, synthetic construct
  source 1..15: mol_type = other DNA
gctcgcagtcttttg

SEQ ID NO: 16082 - DNA, 15 bp, synthetic construct
  source 1..15: mol_type = other DNA
gctcgcagtcttttg

SEQ ID NO: 16083 - DNA, 15 bp, synthetic construct
  source 1..15: mol_type = other DNA
gcctggatttggtca

SEQ ID NO: 16084 - DNA, 15 bp, synthetic construct
  source 1..15: mol_type = other DNA
agaaactcgtttatg

SEQ ID NO: 16085 - DNA, 15 bp, synthetic construct
  source 1..15: mol_type = other DNA
tcagggacttgctaa

SEQ ID NO: 16086 - DNA, 15 bp, synthetic construct
  source 1..15: mol_type = other DNA
tgcgtgagcttcacc

SEQ ID NO: 16087 - DNA, 15 bp, synthetic construct
  source 1..15: mol_type = other DNA
gacatcatcatcaag

SEQ ID NO: 16088 - DNA, 15 bp, synthetic construct
  source 1..15: mol_type = other DNA
cacagcccgaacctc

SEQ ID NO: 16089 - DNA, 15 bp, synthetic construct
  source 1..15: mol_type = other DNA
gggaccgagagttga

SEQ ID NO: 16090 - DNA, 15 bp, synthetic construct
  source 1..15: mol_type = other DNA
gtacggcagggagat

SEQ ID NO: 16091 - DNA, 15 bp, synthetic construct
  source 1..15: mol_type = other DNA
tgccagtgtgttcgc

SEQ ID NO: 16092 - DNA, 15 bp, synthetic construct
  source 1..15: mol_type = other DNA
ggctatgacgtgatg

SEQ ID NO: 16093 - DNA, 15 bp, synthetic construct
  source 1..15: mol_type = other DNA
tgccagtgtgttcgc

SEQ ID NO: 16094 - DNA, 15 bp, synthetic construct
  source 1..15: mol_type = other DNA
ggctatgacgtgatg

SEQ ID NO: 16095 - DNA, 15 bp, synthetic construct
  source 1..15: mol_type = other DNA
tctcaggtttaatca

SEQ ID NO: 16096 - DNA, 15 bp, synthetic construct
  source 1..15: mol_type = other DNA
ctaccgagagacaca

SEQ ID NO: 16097 - DNA, 15 bp, synthetic construct
  source 1..15: mol_type = other DNA
cacccctcactgtct

SEQ ID NO: 16098 - DNA, 15 bp, synthetic construct
  source 1..15: mol_type = other DNA
gccctgcctcacata

SEQ ID NO: 16099 - DNA, 15 bp, synthetic construct
  source 1..15: mol_type = other DNA
tttttgctcatctca

SEQ ID NO: 16100 - DNA, 15 bp, synthetic construct
  source 1..15: mol_type = other DNA
gttcagacacactga

SEQ ID NO: 16101 - DNA, 15 bp, synthetic construct
  source 1..15: mol_type = other DNA
ttgaataactctcca

SEQ ID NO: 16102 - DNA, 15 bp, synthetic construct
  source 1..15: mol_type = other DNA
atgcaacctttccac

SEQ ID NO: 16103 - DNA, 15 bp, synthetic construct
  source 1..15: mol_type = other DNA
tggtccacgtgattc

SEQ ID NO: 16104 - DNA, 15 bp, synthetic construct
  source 1..15: mol_type = other DNA
ttttcaggctatcgt

SEQ ID NO: 16105 - DNA, 15 bp, synthetic construct
  source 1..15: mol_type = other DNA
cgtccctcaccagtg

SEQ ID NO: 16106 - DNA, 15 bp, synthetic construct
  source 1..15: mol_type = other DNA
acagggagcgtgaaa

SEQ ID NO: 16107 - DNA, 15 bp, synthetic construct
  source 1..15: mol_type = other DNA
gatggctcgatacgt

SEQ ID NO: 16108 - DNA, 15 bp, synthetic construct
  source 1..15: mol_type = other DNA
caggcctagtaacga

SEQ ID NO: 16109 - DNA, 15 bp, synthetic construct
  source 1..15: mol_type = other DNA
gatggctcgatacgt

SEQ ID NO: 16110 - DNA, 15 bp, synthetic construct
  source 1..15: mol_type = other DNA
caggcctagtaacga

SEQ ID NO: 16111 - DNA, 15 bp, synthetic construct
  source 1..15: mol_type = other DNA
gaacaagcttgtcac

SEQ ID NO: 16112 - DNA, 15 bp, synthetic construct
  source 1..15: mol_type = other DNA
tggtctgtctcacat

SEQ ID NO: 16113 - DNA, 15 bp, synthetic construct
  source 1..15: mol_type = other DNA
gaacaagcttgtcac

SEQ ID NO: 16114 - DNA, 15 bp, synthetic construct
  source 1..15: mol_type = other DNA
tggtctgtctcacat

SEQ ID NO: 16115 - DNA, 15 bp, synthetic construct
  source 1..15: mol_type = other DNA
cgtggcaccctcgta

SEQ ID NO: 16116 - DNA, 15 bp, synthetic construct
  source 1..15: mol_type = other DNA
tgaacactgggacca

SEQ ID NO: 16117 - DNA, 15 bp, synthetic construct
  source 1..15: mol_type = other DNA
gttttgcatcaggta

SEQ ID NO: 16118 - DNA, 15 bp, synthetic construct
  source 1..15: mol_type = other DNA
aggccgccaggttcg

SEQ ID NO: 16119 - DNA, 15 bp, synthetic construct
  source 1..15: mol_type = other DNA
tggtcttcgagttgg

SEQ ID NO: 16120 - DNA, 15 bp, synthetic construct
  source 1..15: mol_type = other DNA
aaagatggcgctcag

SEQ ID NO: 16121 - DNA, 15 bp, synthetic construct
  source 1..15: mol_type = other DNA
gtggtcctgaggatt

SEQ ID NO: 16122 - DNA, 15 bp, synthetic construct
  source 1..15: mol_type = other DNA
ggcgttagacagctc

SEQ ID NO: 16123 - DNA, 15 bp, synthetic construct
  source 1..15: mol_type = other DNA
accagctggctgatg

SEQ ID NO: 16124 - DNA, 15 bp, synthetic construct
  source 1..15: mol_type = other DNA
ccgtcaccgggagca

SEQ ID NO: 16125 - DNA, 15 bp, synthetic construct
  source 1..15: mol_type = other DNA
tcgacctgtgtgtag

SEQ ID NO: 16126 - DNA, 15 bp, synthetic construct
  source 1..15: mol_type = other DNA
tgcgagtcgggacct

SEQ ID NO: 16127 - DNA, 15 bp, synthetic construct
  source 1..15: mol_type = other DNA
gcagccccgtctgtg

SEQ ID NO: 16128 - DNA, 15 bp, synthetic construct
  source 1..15: mol_type = other DNA
acatctcccccaagt

SEQ ID NO: 16129 - DNA, 15 bp, synthetic construct
  source 1..15: mol_type = other DNA
tggaggacagatagg

SEQ ID NO: 16130 - DNA, 15 bp, synthetic construct
  source 1..15: mol_type = other DNA
gacgactcgctcgat

SEQ ID NO: 16131 - DNA, 15 bp, synthetic construct
  source 1..15: mol_type = other DNA
gtcctttctagtcgt

SEQ ID NO: 16132 - DNA, 15 bp, synthetic construct
  source 1..15: mol_type = other DNA
gtgaccgggccttaa

SEQ ID NO: 16133 - DNA, 15 bp, synthetic construct
  source 1..15: mol_type = other DNA
ctctgcaggacatcc

SEQ ID NO: 16134 - DNA, 15 bp, synthetic construct
  source 1..15: mol_type = other DNA
ttaaggcgtccctct

SEQ ID NO: 16135 - DNA, 15 bp, synthetic construct
  source 1..15: mol_type = other DNA
ggcctcgggcgaaga

SEQ ID NO: 16136 - DNA, 15 bp, synthetic construct
  source 1..15: mol_type = other DNA
gtgaggcaccaggtt

SEQ ID NO: 16137 - DNA, 15 bp, synthetic construct
  source 1..15: mol_type = other DNA
tcgcctgtgccctag

SEQ ID NO: 16138 - DNA, 15 bp, synthetic construct
  source 1..15: mol_type = other DNA
cagctccagcggatg

SEQ ID NO: 16139 - DNA, 15 bp, synthetic construct
  source 1..15: mol_type = other DNA
cctaagctccctgtg

SEQ ID NO: 16140 - DNA, 15 bp, synthetic construct
  source 1..15: mol_type = other DNA
gactccctacccact

SEQ ID NO: 16141 - DNA, 15 bp, synthetic construct
  source 1..15: mol_type = other DNA
tggatggtcttgtct

SEQ ID NO: 16142 - DNA, 15 bp, synthetic construct
  source 1..15: mol_type = other DNA
tccgtgtacctgtag

SEQ ID NO: 16143 - DNA, 15 bp, synthetic construct
  source 1..15: mol_type = other DNA
gtccaatgagcatgg

SEQ ID NO: 16144 - DNA, 15 bp, synthetic construct
  source 1..15: mol_type = other DNA
tgcatgatgtcatcg

SEQ ID NO: 16145 - DNA, 15 bp, synthetic construct
  source 1..15: mol_type = other DNA
cgagctgaaggactg

SEQ ID NO: 16146 - DNA, 15 bp, synthetic construct
  source 1..15: mol_type = other DNA
tgttaggctcggaac

SEQ ID NO: 16147 - DNA, 15 bp, synthetic construct
  source 1..15: mol_type = other DNA
cctggagtaatcagg

SEQ ID NO: 16148 - DNA, 15 bp, synthetic construct
  source 1..15: mol_type = other DNA
accggagtcattgta

SEQ ID NO: 16149 - DNA, 15 bp, synthetic construct
  source 1..15: mol_type = other DNA
cgtcttccacatcgc

SEQ ID NO: 16150 - DNA, 15 bp, synthetic construct
  source 1..15: mol_type = other DNA
cgtcttccacatcgc

SEQ ID NO: 16151 - DNA, 15 bp, synthetic construct
  source 1..15: mol_type = other DNA
cctttctcttgtccg

SEQ ID NO: 16152 - DNA, 15 bp, synthetic construct
  source 1..15: mol_type = other DNA
ggttgcggtcagaca

SEQ ID NO: 16153 - DNA, 15 bp, synthetic construct
  source 1..15: mol_type = other DNA
cctttctcttgtccg

SEQ ID NO: 16154 - DNA, 15 bp, synthetic construct
  source 1..15: mol_type = other DNA
ggttgcggtcagaca

SEQ ID NO: 16155 - DNA, 15 bp, synthetic construct
  source 1..15: mol_type = other DNA
gcgtgaccaccaagt

SEQ ID NO: 16156 - DNA, 15 bp, synthetic construct
  source 1..15: mol_type = other DNA
gcaatccacttggag

SEQ ID NO: 16157 - DNA, 15 bp, synthetic construct
  source 1..15: mol_type = other DNA
gcgtgaccaccaagt

SEQ ID NO: 16158 - DNA, 15 bp, synthetic construct
  source 1..15: mol_type = other DNA
gcaatccacttggag

SEQ ID NO: 16159 - DNA, 15 bp, synthetic construct
  source 1..15: mol_type = other DNA
gcctcacaggtgcat

SEQ ID NO: 16160 - DNA, 15 bp, synthetic construct
  source 1..15: mol_type = other DNA
ggtgcaccagaggta

SEQ ID NO: 16161 - DNA, 15 bp, synthetic construct
  source 1..15: mol_type = other DNA
gcctcacaggtgcat

SEQ ID NO: 16162 - DNA, 15 bp, synthetic construct
  source 1..15: mol_type = other DNA
ggtgcaccagaggta

SEQ ID NO: 16163 - DNA, 15 bp, synthetic construct
  source 1..15: mol_type = other DNA
cttcagatctgcgag

SEQ ID NO: 16164 - DNA, 15 bp, synthetic construct
  source 1..15: mol_type = other DNA
aggcaataccgtcca

SEQ ID NO: 16165 - DNA, 15 bp, synthetic construct
  source 1..15: mol_type = other DNA
acctacgtgcagcca

SEQ ID NO: 16166 - DNA, 15 bp, synthetic construct
  source 1..15: mol_type = other DNA
ttcccgtggcccatc

SEQ ID NO: 16167 - DNA, 15 bp, synthetic construct
  source 1..15: mol_type = other DNA
gaggactaagtgctg

SEQ ID NO: 16168 - DNA, 15 bp, synthetic construct
  source 1..15: mol_type = other DNA
ttgaccgactcaacc

SEQ ID NO: 16169 - DNA, 15 bp, synthetic construct
  source 1..15: mol_type = other DNA
ctccagctggtagac

SEQ ID NO: 16170 - DNA, 15 bp, synthetic construct
  source 1..15: mol_type = other DNA
ctttgaagggatgga

SEQ ID NO: 16171 - DNA, 15 bp, synthetic construct
  source 1..15: mol_type = other DNA
cctcgaacacggctt

SEQ ID NO: 16172 - DNA, 15 bp, synthetic construct
  source 1..15: mol_type = other DNA
gtgcagccggactga

SEQ ID NO: 16173 - DNA, 15 bp, synthetic construct
  source 1..15: mol_type = other DNA
cctcgaacacggctt

SEQ ID NO: 16174 - DNA, 15 bp, synthetic construct
  source 1..15: mol_type = other DNA
gtgcagccggactga

SEQ ID NO: 16175 - DNA, 15 bp, synthetic construct
  source 1..15: mol_type = other DNA
gtcagtccggctgca

SEQ ID NO: 16176 - DNA, 15 bp, synthetic construct
  source 1..15: mol_type = other DNA
tccgctggcgctacc

SEQ ID NO: 16177 - DNA, 15 bp, synthetic construct
  source 1..15: mol_type = other DNA
catctcgtagtcctg

SEQ ID NO: 16178 - DNA, 15 bp, synthetic construct
  source 1..15: mol_type = other DNA
agctcgtgtcttcct

SEQ ID NO: 16179 - DNA, 15 bp, synthetic construct
  source 1..15: mol_type = other DNA
gagagcccagtccca

SEQ ID NO: 16180 - DNA, 15 bp, synthetic construct
  source 1..15: mol_type = other DNA
cagctcagctgtacg

SEQ ID NO: 16181 - DNA, 15 bp, synthetic construct
  source 1..15: mol_type = other DNA
agctgagctaagacg

SEQ ID NO: 16182 - DNA, 15 bp, synthetic construct
  source 1..15: mol_type = other DNA
gcttttggtcaaggt

SEQ ID NO: 16183 - DNA, 15 bp, synthetic construct
  source 1..15: mol_type = other DNA
agctgagctaagacg

SEQ ID NO: 16184 - DNA, 15 bp, synthetic construct
  source 1..15: mol_type = other DNA
gcttttggtcaaggt

SEQ ID NO: 16185 - DNA, 15 bp, synthetic construct
  source 1..15: mol_type = other DNA
atgtcttgccaaaga

SEQ ID NO: 16186 - DNA, 15 bp, synthetic construct
  source 1..15: mol_type = other DNA
gtggacccgtttcgt

SEQ ID NO: 16187 - DNA, 15 bp, synthetic construct
  source 1..15: mol_type = other DNA
atgtcttgccaaaga

SEQ ID NO: 16188 - DNA, 15 bp, synthetic construct
  source 1..15: mol_type = other DNA
gtggacccgtttcgt

SEQ ID NO: 16189 - DNA, 15 bp, synthetic construct
  source 1..15: mol_type = other DNA
gggctgcggagctca

SEQ ID NO: 16190 - DNA, 15 bp, synthetic construct
  source 1..15: mol_type = other DNA
cctcccgccctcctg

SEQ ID NO: 16191 - DNA, 15 bp, synthetic construct
  source 1..15: mol_type = other DNA
gctgccggtgggagg

SEQ ID NO: 16192 - DNA, 15 bp, synthetic construct
  source 1..15: mol_type = other DNA
tgccacccgctccta

SEQ ID NO: 16193 - DNA, 15 bp, synthetic construct
  source 1..15: mol_type = other DNA
gggcgtaccgaggtg

SEQ ID NO: 16194 - DNA, 15 bp, synthetic construct
  source 1..15: mol_type = other DNA
ggcctaggcggcttc

SEQ ID NO: 16195 - DNA, 15 bp, synthetic construct
  source 1..15: mol_type = other DNA
tgagggtgggctcct

SEQ ID NO: 16196 - DNA, 15 bp, synthetic construct
  source 1..15: mol_type = other DNA
cctcctgaccagcct

SEQ ID NO: 16197 - DNA, 15 bp, synthetic construct
  source 1..15: mol_type = other DNA
cccttgtccttggcg

SEQ ID NO: 16198 - DNA, 15 bp, synthetic construct
  source 1..15: mol_type = other DNA
tgttgggttttgatg

SEQ ID NO: 16199 - DNA, 15 bp, synthetic construct
  source 1..15: mol_type = other DNA
aaggctgctctctca

SEQ ID NO: 16200 - DNA, 15 bp, synthetic construct
  source 1..15: mol_type = other DNA
ccctgggtctctggt

SEQ ID NO: 16201 - DNA, 15 bp, synthetic construct
  source 1..15: mol_type = other DNA
aggcaaaactaaagc

SEQ ID NO: 16202 - DNA, 15 bp, synthetic construct
  source 1..15: mol_type = other DNA
cagccgttgccaaag

SEQ ID NO: 16203 - DNA, 15 bp, synthetic construct
  source 1..15: mol_type = other DNA
tgcagagcattgaac

SEQ ID NO: 16204 - DNA, 15 bp, synthetic construct
  source 1..15: mol_type = other DNA
actcttcctggccaa

SEQ ID NO: 16205 - DNA, 15 bp, synthetic construct
  source 1..15: mol_type = other DNA
cagcatgccatgtag

SEQ ID NO: 16206 - DNA, 15 bp, synthetic construct
  source 1..15: mol_type = other DNA
tacaggcctccatca

SEQ ID NO: 16207 - DNA, 15 bp, synthetic construct
  source 1..15: mol_type = other DNA
tgatggaggcctgta

SEQ ID NO: 16208 - DNA, 15 bp, synthetic construct
  source 1..15: mol_type = other DNA
ctgtctctgcttccc

SEQ ID NO: 16209 - DNA, 15 bp, synthetic construct
  source 1..15: mol_type = other DNA
ccgcagaccctccac

SEQ ID NO: 16210 - DNA, 15 bp, synthetic construct
  source 1..15: mol_type = other DNA
cagcctaccatgtcc

SEQ ID NO: 16211 - DNA, 15 bp, synthetic construct
  source 1..15: mol_type = other DNA
ccgcagaccctccac

SEQ ID NO: 16212 - DNA, 15 bp, synthetic construct
  source 1..15: mol_type = other DNA
cagcctaccatgtcc

SEQ ID NO: 16213 - DNA, 15 bp, synthetic construct
  source 1..15: mol_type = other DNA
cctcctctggcaatc

SEQ ID NO: 16214 - DNA, 15 bp, synthetic construct
  source 1..15: mol_type = other DNA
gccaaatccttctca

SEQ ID NO: 16215 - DNA, 15 bp, synthetic construct
  source 1..15: mol_type = other DNA
cctcctctggcaatc

SEQ ID NO: 16216 - DNA, 15 bp, synthetic construct
  source 1..15: mol_type = other DNA
gccaaatccttctca

SEQ ID NO: 16217 - DNA, 15 bp, synthetic construct
  source 1..15: mol_type = other DNA
gagccccctcctctc

SEQ ID NO: 16218 - DNA, 15 bp, synthetic construct
  source 1..15: mol_type = other DNA
ctggtaccttgctga

SEQ ID NO: 16219 - DNA, 15 bp, synthetic construct
  source 1..15: mol_type = other DNA
ccagggctcgaggtt

SEQ ID NO: 16220 - DNA, 15 bp, synthetic construct
  source 1..15: mol_type = other DNA
acgctgaggtgagga

SEQ ID NO: 16221 - DNA, 15 bp, synthetic construct
  source 1..15: mol_type = other DNA
ccagggctcgaggtt

SEQ ID NO: 16222 - DNA, 15 bp, synthetic construct
  source 1..15: mol_type = other DNA
acgctgaggtgagga

SEQ ID NO: 16223 - DNA, 15 bp, synthetic construct
  source 1..15: mol_type = other DNA
cttcatctgtccaac

SEQ ID NO: 16224 - DNA, 15 bp, synthetic construct
  source 1..15: mol_type = other DNA
accactgccctcgtc

SEQ ID NO: 16225 - DNA, 15 bp, synthetic construct
  source 1..15: mol_type = other DNA
cttcatctgtccaac

SEQ ID NO: 16226 - DNA, 15 bp, synthetic construct
  source 1..15: mol_type = other DNA
accactgccctcgtc

SEQ ID NO: 16227 - DNA, 15 bp, synthetic construct
  source 1..15: mol_type = other DNA
cttcatctgtccaac

SEQ ID NO: 16228 - DNA, 15 bp, synthetic construct
  source 1..15: mol_type = other DNA
accactgccctcgtc

SEQ ID NO: 16229 - DNA, 15 bp, synthetic construct
  source 1..15: mol_type = other DNA
cattcccagtactcc

SEQ ID NO: 16230 - DNA, 15 bp, synthetic construct
  source 1..15: mol_type = other DNA
tctgcctacaggtgg

SEQ ID NO: 16231 - DNA, 15 bp, synthetic construct
  source 1..15: mol_type = other DNA
cattcccagtactcc

SEQ ID NO: 16232 - DNA, 15 bp, synthetic construct
  source 1..15: mol_type = other DNA
tctgcctacaggtgg

SEQ ID NO: 16233 - DNA, 15 bp, synthetic construct
  source 1..15: mol_type = other DNA
caggtgaggctgagg

SEQ ID NO: 16234 - DNA, 15 bp, synthetic construct
  source 1..15: mol_type = other DNA
cccttttgcgcttcc

SEQ ID NO: 16235 - DNA, 15 bp, synthetic construct
  source 1..15: mol_type = other DNA
ttgtcaaagaagcca

SEQ ID NO: 16236 - DNA, 15 bp, synthetic construct
  source 1..15: mol_type = other DNA
cttcctggtcaatga

SEQ ID NO: 16237 - DNA, 15 bp, synthetic construct
  source 1..15: mol_type = other DNA
ttgtcaaagaagcca

SEQ ID NO: 16238 - DNA, 15 bp, synthetic construct
  source 1..15: mol_type = other DNA
cttcctggtcaatga

SEQ ID NO: 16239 - DNA, 15 bp, synthetic construct
  source 1..15: mol_type = other DNA
agtgggaacatggaa

SEQ ID NO: 16240 - DNA, 15 bp, synthetic construct
  source 1..15: mol_type = other DNA
gtttgtgcggaccct

SEQ ID NO: 16241 - DNA, 15 bp, synthetic construct
  source 1..15: mol_type = other DNA
caggtccctgacgat

SEQ ID NO: 16242 - DNA, 15 bp, synthetic construct
  source 1..15: mol_type = other DNA
cagcctggacatctt

SEQ ID NO: 16243 - DNA, 15 bp, synthetic construct
  source 1..15: mol_type = other DNA
caggtccctgacgat

SEQ ID NO: 16244 - DNA, 15 bp, synthetic construct
  source 1..15: mol_type = other DNA
cagcctggacatctt

SEQ ID NO: 16245 - DNA, 15 bp, synthetic construct
  source 1..15: mol_type = other DNA
cggatcttccacacg

SEQ ID NO: 16246 - DNA, 15 bp, synthetic construct
  source 1..15: mol_type = other DNA
ccaaagctgagatga

SEQ ID NO: 16247 - DNA, 15 bp, synthetic construct
  source 1..15: mol_type = other DNA
gagactcactcccag

SEQ ID NO: 16248 - DNA, 15 bp, synthetic construct
  source 1..15: mol_type = other DNA
ggcggctgtgtcctc

SEQ ID NO: 16249 - DNA, 15 bp, synthetic construct
  source 1..15: mol_type = other DNA
ggcatccaactggtc

SEQ ID NO: 16250 - DNA, 15 bp, synthetic construct
  source 1..15: mol_type = other DNA
gccatgtccgctttg

SEQ ID NO: 16251 - DNA, 15 bp, synthetic construct
  source 1..15: mol_type = other DNA
ggcatccaactggtc

SEQ ID NO: 16252 - DNA, 15 bp, synthetic construct
  source 1..15: mol_type = other DNA
gccatgtccgctttg

SEQ ID NO: 16253 - DNA, 15 bp, synthetic construct
  source 1..15: mol_type = other DNA
ggcatccaactggtc

SEQ ID NO: 16254 - DNA, 15 bp, synthetic construct
  source 1..15: mol_type = other DNA
gccatgtccgctttg

SEQ ID NO: 16255 - DNA, 15 bp, synthetic construct
  source 1..15: mol_type = other DNA
agcacagggtcactc

SEQ ID NO: 16256 - DNA, 15 bp, synthetic construct
  source 1..15: mol_type = other DNA
acctctccagccact

SEQ ID NO: 16257 - DNA, 15 bp, synthetic construct
  source 1..15: mol_type = other DNA
ctgtccgccacacca

SEQ ID NO: 16258 - DNA, 15 bp, synthetic construct
  source 1..15: mol_type = other DNA
gggtatgggctctga

SEQ ID NO: 16259 - DNA, 15 bp, synthetic construct
  source 1..15: mol_type = other DNA
atacccggtccagtc

SEQ ID NO: 16260 - DNA, 15 bp, synthetic construct
  source 1..15: mol_type = other DNA
tctgaggaacctgag

SEQ ID NO: 16261 - DNA, 15 bp, synthetic construct
  source 1..15: mol_type = other DNA
ccgagtgtaggtaga

SEQ ID NO: 16262 - DNA, 15 bp, synthetic construct
  source 1..15: mol_type = other DNA
aaatttgctttctgt

SEQ ID NO: 16263 - DNA, 15 bp, synthetic construct
  source 1..15: mol_type = other DNA
atggaagccctacga

SEQ ID NO: 16264 - DNA, 15 bp, synthetic construct
  source 1..15: mol_type = other DNA
aactccgccaactcc

SEQ ID NO: 16265 - DNA, 15 bp, synthetic construct
  source 1..15: mol_type = other DNA
gtccagcagcgtata

SEQ ID NO: 16266 - DNA, 15 bp, synthetic construct
  source 1..15: mol_type = other DNA
cattccagacacagg

SEQ ID NO: 16267 - DNA, 15 bp, synthetic construct
  source 1..15: mol_type = other DNA
agttgttgggcacct

SEQ ID NO: 16268 - DNA, 15 bp, synthetic construct
  source 1..15: mol_type = other DNA
tccatccccgaggct

SEQ ID NO: 16269 - DNA, 15 bp, synthetic construct
  source 1..15: mol_type = other DNA
agctgcaccacgtca

SEQ ID NO: 16270 - DNA, 15 bp, synthetic construct
  source 1..15: mol_type = other DNA
gccgagtcaccatct

SEQ ID NO: 16271 - DNA, 15 bp, synthetic construct
  source 1..15: mol_type = other DNA
gcacagcaggctccg

SEQ ID NO: 16272 - DNA, 15 bp, synthetic construct
  source 1..15: mol_type = other DNA
actgacctcacgcat

SEQ ID NO: 16273 - DNA, 15 bp, synthetic construct
  source 1..15: mol_type = other DNA
cgaagatgggatggg

SEQ ID NO: 16274 - DNA, 15 bp, synthetic construct
  source 1..15: mol_type = other DNA
ggaggccatgatgct

SEQ ID NO: 16275 - DNA, 15 bp, synthetic construct
  source 1..15: mol_type = other DNA
cccgcggtggtctct

SEQ ID NO: 16276 - DNA, 15 bp, synthetic construct
  source 1..15: mol_type = other DNA
gtggaggccctgggt

SEQ ID NO: 16277 - DNA, 15 bp, synthetic construct
  source 1..15: mol_type = other DNA
aacggctgaggctac

SEQ ID NO: 16278 - DNA, 15 bp, synthetic construct
  source 1..15: mol_type = other DNA
cggagactctggtgt

SEQ ID NO: 16279 - DNA, 15 bp, synthetic construct
  source 1..15: mol_type = other DNA
gatgtcatccacagt

SEQ ID NO: 16280 - DNA, 15 bp, synthetic construct
  source 1..15: mol_type = other DNA
acacagcgtctagca

SEQ ID NO: 16281 - DNA, 15 bp, synthetic construct
  source 1..15: mol_type = other DNA
agccctctgcaaagc

SEQ ID NO: 16282 - DNA, 15 bp, synthetic construct
  source 1..15: mol_type = other DNA
tctgctcgtaggtct

SEQ ID NO: 16283 - DNA, 15 bp, synthetic construct
  source 1..15: mol_type = other DNA
cctgggagcacacta

SEQ ID NO: 16284 - DNA, 15 bp, synthetic construct
  source 1..15: mol_type = other DNA
ccacctgctcaccac

SEQ ID NO: 16285 - DNA, 15 bp, synthetic construct
  source 1..15: mol_type = other DNA
gcaggtggcagtctc

SEQ ID NO: 16286 - DNA, 15 bp, synthetic construct
  source 1..15: mol_type = other DNA
ggagccctcccgtga

SEQ ID NO: 16287 - DNA, 15 bp, synthetic construct
  source 1..15: mol_type = other DNA
tgacgtcacagagtc

SEQ ID NO: 16288 - DNA, 15 bp, synthetic construct
  source 1..15: mol_type = other DNA
tacaccttcacgctc

SEQ ID NO: 16289 - DNA, 15 bp, synthetic construct
  source 1..15: mol_type = other DNA
ccgtgcattcgaagt

SEQ ID NO: 16290 - DNA, 15 bp, synthetic construct
  source 1..15: mol_type = other DNA
aagacgctggtgctg

SEQ ID NO: 16291 - DNA, 15 bp, synthetic construct
  source 1..15: mol_type = other DNA
gcaccagtcgcatgc

SEQ ID NO: 16292 - DNA, 15 bp, synthetic construct
  source 1..15: mol_type = other DNA
acttggagggccgct

SEQ ID NO: 16293 - DNA, 15 bp, synthetic construct
  source 1..15: mol_type = other DNA
gcaccagtcgcatgc

SEQ ID NO: 16294 - DNA, 15 bp, synthetic construct
  source 1..15: mol_type = other DNA
acttggagggccgct

SEQ ID NO: 16295 - DNA, 15 bp, synthetic construct
  source 1..15: mol_type = other DNA
accctctgccctgtc

SEQ ID NO: 16296 - DNA, 15 bp, synthetic construct
  source 1..15: mol_type = other DNA
ttccagcaggccaaa

SEQ ID NO: 16297 - DNA, 15 bp, synthetic construct
  source 1..15: mol_type = other DNA
aacagtagatgacca

SEQ ID NO: 16298 - DNA, 15 bp, synthetic construct
  source 1..15: mol_type = other DNA
ctctcaggccacgtc

SEQ ID NO: 16299 - DNA, 15 bp, synthetic construct
  source 1..15: mol_type = other DNA
gaggacggccctgcc

SEQ ID NO: 16300 - DNA, 15 bp, synthetic construct
  source 1..15: mol_type = other DNA
ctgacacagagcatc

SEQ ID NO: 16301 - DNA, 15 bp, synthetic construct
  source 1..15: mol_type = other DNA
gccaccgtcacattg

SEQ ID NO: 16302 - DNA, 15 bp, synthetic construct
  source 1..15: mol_type = other DNA
atcacagcgcaacta

SEQ ID NO: 16303 - DNA, 15 bp, synthetic construct
  source 1..15: mol_type = other DNA
aacgtgggcctccaa

SEQ ID NO: 16304 - DNA, 15 bp, synthetic construct
  source 1..15: mol_type = other DNA
tgtggcctaccactg

SEQ ID NO: 16305 - DNA, 15 bp, synthetic construct
  source 1..15: mol_type = other DNA
cccatccccaaagtc

SEQ ID NO: 16306 - DNA, 15 bp, synthetic construct
  source 1..15: mol_type = other DNA
tgggcagtgagaacc

SEQ ID NO: 16307 - DNA, 15 bp, synthetic construct
  source 1..15: mol_type = other DNA
acggcgtcctgaacc

SEQ ID NO: 16308 - DNA, 15 bp, synthetic construct
  source 1..15: mol_type = other DNA
actgagaggaacttc

SEQ ID NO: 16309 - DNA, 15 bp, synthetic construct
  source 1..15: mol_type = other DNA
ccagcgagtcgccct

SEQ ID NO: 16310 - DNA, 15 bp, synthetic construct
  source 1..15: mol_type = other DNA
cccgaggtgctcccc

SEQ ID NO: 16311 - DNA, 15 bp, synthetic construct
  source 1..15: mol_type = other DNA
agctgtgggagaaac

SEQ ID NO: 16312 - DNA, 15 bp, synthetic construct
  source 1..15: mol_type = other DNA
atgctggcaccttct

SEQ ID NO: 16313 - DNA, 15 bp, synthetic construct
  source 1..15: mol_type = other DNA
cattgagccggatgg

SEQ ID NO: 16314 - DNA, 15 bp, synthetic construct
  source 1..15: mol_type = other DNA
tgggctcagccaacg

SEQ ID NO: 16315 - DNA, 15 bp, synthetic construct
  source 1..15: mol_type = other DNA
cacatccacttccac

SEQ ID NO: 16316 - DNA, 15 bp, synthetic construct
  source 1..15: mol_type = other DNA
caccatggacttcgt

SEQ ID NO: 16317 - DNA, 15 bp, synthetic construct
  source 1..15: mol_type = other DNA
gggtgacgcttgtgt

SEQ ID NO: 16318 - DNA, 15 bp, synthetic construct
  source 1..15: mol_type = other DNA
ccgtggttagggatg

SEQ ID NO: 16319 - DNA, 15 bp, synthetic construct
  source 1..15: mol_type = other DNA
ccagctgtaggagac

SEQ ID NO: 16320 - DNA, 15 bp, synthetic construct
  source 1..15: mol_type = other DNA
tgggtgctctgtgac

SEQ ID NO: 16321 - DNA, 15 bp, synthetic construct
  source 1..15: mol_type = other DNA
taggacccccaggga

SEQ ID NO: 16322 - DNA, 15 bp, synthetic construct
  source 1..15: mol_type = other DNA
cgagggtccggaggt

SEQ ID NO: 16323 - DNA, 15 bp, synthetic construct
  source 1..15: mol_type = other DNA
cggctcacctcattc

SEQ ID NO: 16324 - DNA, 15 bp, synthetic construct
  source 1..15: mol_type = other DNA
accgcgtccaacaac

SEQ ID NO: 16325 - DNA, 15 bp, synthetic construct
  source 1..15: mol_type = other DNA
gagtcattggcagca

SEQ ID NO: 16326 - DNA, 15 bp, synthetic construct
  source 1..15: mol_type = other DNA
acttcaccagcatct

SEQ ID NO: 16327 - DNA, 15 bp, synthetic construct
  source 1..15: mol_type = other DNA
cacctctggctccac

SEQ ID NO: 16328 - DNA, 15 bp, synthetic construct
  source 1..15: mol_type = other DNA
gcccactacctcttc

SEQ ID NO: 16329 - DNA, 15 bp, synthetic construct
  source 1..15: mol_type = other DNA
ccccgaaggtccagt

SEQ ID NO: 16330 - DNA, 15 bp, synthetic construct
  source 1..15: mol_type = other DNA
ggagcatgtgtacct

SEQ ID NO: 16331 - DNA, 15 bp, synthetic construct
  source 1..15: mol_type = other DNA
actgtgcagttctgt

SEQ ID NO: 16332 - DNA, 15 bp, synthetic construct
  source 1..15: mol_type = other DNA
gctccgcggactcag

SEQ ID NO: 16333 - DNA, 15 bp, synthetic construct
  source 1..15: mol_type = other DNA
cggccaggctcatgt

SEQ ID NO: 16334 - DNA, 15 bp, synthetic construct
  source 1..15: mol_type = other DNA
ccaaccacacctatg

SEQ ID NO: 16335 - DNA, 15 bp, synthetic construct
  source 1..15: mol_type = other DNA
gtaggtgcccctcga

SEQ ID NO: 16336 - DNA, 15 bp, synthetic construct
  source 1..15: mol_type = other DNA
cccgtcaccttctac

SEQ ID NO: 16337 - DNA, 15 bp, synthetic construct
  source 1..15: mol_type = other DNA
cacgtgtaaagaaca

SEQ ID NO: 16338 - DNA, 15 bp, synthetic construct
  source 1..15: mol_type = other DNA
cacaggtgagtacct

SEQ ID NO: 16339 - DNA, 15 bp, synthetic construct
  source 1..15: mol_type = other DNA
ttctcgaaggcatta

SEQ ID NO: 16340 - DNA, 15 bp, synthetic construct
  source 1..15: mol_type = other DNA
cctcagtgctgctac

SEQ ID NO: 16341 - DNA, 15 bp, synthetic construct
  source 1..15: mol_type = other DNA
accccgtgctcagag

SEQ ID NO: 16342 - DNA, 15 bp, synthetic construct
  source 1..15: mol_type = other DNA
acccctgtcccggtt

SEQ ID NO: 16343 - DNA, 15 bp, synthetic construct
  source 1..15: mol_type = other DNA
gcacccagttacctc

SEQ ID NO: 16344 - DNA, 15 bp, synthetic construct
  source 1..15: mol_type = other DNA
cgtggagcggatgaa

SEQ ID NO: 16345 - DNA, 15 bp, synthetic construct
  source 1..15: mol_type = other DNA
cactgtggagacctg

SEQ ID NO: 16346 - DNA, 15 bp, synthetic construct
  source 1..15: mol_type = other DNA
ccaccttcacctctg

SEQ ID NO: 16347 - DNA, 15 bp, synthetic construct
  source 1..15: mol_type = other DNA
tccactcacccacag

SEQ ID NO: 16348 - DNA, 15 bp, synthetic construct
  source 1..15: mol_type = other DNA
caggctgacaccatt

SEQ ID NO: 16349 - DNA, 15 bp, synthetic construct
  source 1..15: mol_type = other DNA
gagcaccctgtctgc

SEQ ID NO: 16350 - DNA, 15 bp, synthetic construct
  source 1..15: mol_type = other DNA
tgttctcagtggtag

SEQ ID NO: 16351 - DNA, 15 bp, synthetic construct
  source 1..15: mol_type = other DNA
gttttccaccaccac

SEQ ID NO: 16352 - DNA, 15 bp, synthetic construct
  source 1..15: mol_type = other DNA
cggctcagccttggt

SEQ ID NO: 16353 - DNA, 15 bp, synthetic construct
  source 1..15: mol_type = other DNA
cagacattctcaaag

SEQ ID NO: 16354 - DNA, 15 bp, synthetic construct
  source 1..15: mol_type = other DNA
aggtccgggcagagg

SEQ ID NO: 16355 - DNA, 15 bp, synthetic construct
  source 1..15: mol_type = other DNA
caaagctgcaggaga

SEQ ID NO: 16356 - DNA, 15 bp, synthetic construct
  source 1..15: mol_type = other DNA
acctctccgccaacg

SEQ ID NO: 16357 - DNA, 15 bp, synthetic construct
  source 1..15: mol_type = other DNA
agggttgggcctcaa

SEQ ID NO: 16358 - DNA, 15 bp, synthetic construct
  source 1..15: mol_type = other DNA
caggtcaccctccac

SEQ ID NO: 16359 - DNA, 15 bp, synthetic construct
  source 1..15: mol_type = other DNA
ctgcaagccaacgag

SEQ ID NO: 16360 - DNA, 15 bp, synthetic construct
  source 1..15: mol_type = other DNA
tctgcaactgtcctg

SEQ ID NO: 16361 - DNA, 15 bp, synthetic construct
  source 1..15: mol_type = other DNA
cagaggtcggaggtc

SEQ ID NO: 16362 - DNA, 15 bp, synthetic construct
  source 1..15: mol_type = other DNA
ggctgcacgtcaggg

SEQ ID NO: 16363 - DNA, 15 bp, synthetic construct
  source 1..15: mol_type = other DNA
aggaactctctccat

SEQ ID NO: 16364 - DNA, 15 bp, synthetic construct
  source 1..15: mol_type = other DNA
ctgtgggcaaatcag

SEQ ID NO: 16365 - DNA, 15 bp, synthetic construct
  source 1..15: mol_type = other DNA
tgggaaccactctgg

SEQ ID NO: 16366 - DNA, 15 bp, synthetic construct
  source 1..15: mol_type = other DNA
aggtcatggtattcc

SEQ ID NO: 16367 - DNA, 15 bp, synthetic construct
  source 1..15: mol_type = other DNA
gaggaaggcttcacg

SEQ ID NO: 16368 - DNA, 15 bp, synthetic construct
  source 1..15: mol_type = other DNA
gttattcctgaaagg

SEQ ID NO: 16369 - DNA, 15 bp, synthetic construct
  source 1..15: mol_type = other DNA
ggagggcaggttgta

SEQ ID NO: 16370 - DNA, 15 bp, synthetic construct
  source 1..15: mol_type = other DNA
ctcggtccccagtct

SEQ ID NO: 16371 - DNA, 15 bp, synthetic construct
  source 1..15: mol_type = other DNA
gagtgcacagtgagg

SEQ ID NO: 16372 - DNA, 15 bp, synthetic construct
  source 1..15: mol_type = other DNA
accgacctgtgctca

SEQ ID NO: 16373 - DNA, 15 bp, synthetic construct
  source 1..15: mol_type = other DNA
cagctcgcagacgta

SEQ ID NO: 16374 - DNA, 15 bp, synthetic construct
  source 1..15: mol_type = other DNA
gaggagtgccctgag

SEQ ID NO: 16375 - DNA, 15 bp, synthetic construct
  source 1..15: mol_type = other DNA
cagagatctcccaac

SEQ ID NO: 16376 - DNA, 15 bp, synthetic construct
  source 1..15: mol_type = other DNA
gttcccaccggtctc

SEQ ID NO: 16377 - DNA, 15 bp, synthetic construct
  source 1..15: mol_type = other DNA
aagatctccgtgtcc

SEQ ID NO: 16378 - DNA, 15 bp, synthetic construct
  source 1..15: mol_type = other DNA
aaccgcggtggttca

SEQ ID NO: 16379 - DNA, 15 bp, synthetic construct
  source 1..15: mol_type = other DNA
aagatctccgtgtcc

SEQ ID NO: 16380 - DNA, 15 bp, synthetic construct
  source 1..15: mol_type = other DNA
aaccgcggtggttca

SEQ ID NO: 16381 - DNA, 15 bp, synthetic construct
  source 1..15: mol_type = other DNA
agggccacgatgctg

SEQ ID NO: 16382 - DNA, 15 bp, synthetic construct
  source 1..15: mol_type = other DNA
cacacgctgggactt

SEQ ID NO: 16383 - DNA, 15 bp, synthetic construct
  source 1..15: mol_type = other DNA
cggcatccacctcgg

SEQ ID NO: 16384 - DNA, 15 bp, synthetic construct
  source 1..15: mol_type = other DNA
gccttctgcttctcc

SEQ ID NO: 16385 - DNA, 15 bp, synthetic construct
  source 1..15: mol_type = other DNA
ccgagagggctgcga

SEQ ID NO: 16386 - DNA, 15 bp, synthetic construct
  source 1..15: mol_type = other DNA
actgggcagggctca

SEQ ID NO: 16387 - DNA, 15 bp, synthetic construct
  source 1..15: mol_type = other DNA
tggctgggaaggaca

SEQ ID NO: 16388 - DNA, 15 bp, synthetic construct
  source 1..15: mol_type = other DNA
cctgcagaaacctga

SEQ ID NO: 16389 - DNA, 15 bp, synthetic construct
  source 1..15: mol_type = other DNA
acagtcacactcaaa

SEQ ID NO: 16390 - DNA, 15 bp, synthetic construct
  source 1..15: mol_type = other DNA
ccccaatatcccttc

SEQ ID NO: 16391 - DNA, 15 bp, synthetic construct
  source 1..15: mol_type = other DNA
agaagggatattggg

SEQ ID NO: 16392 - DNA, 15 bp, synthetic construct
  source 1..15: mol_type = other DNA
gtgtcccccagtcgt

SEQ ID NO: 16393 - DNA, 15 bp, synthetic construct
  source 1..15: mol_type = other DNA
tccctggaagagacg

SEQ ID NO: 16394 - DNA, 15 bp, synthetic construct
  source 1..15: mol_type = other DNA
gggcccagggatggc

SEQ ID NO: 16395 - DNA, 15 bp, synthetic construct
  source 1..15: mol_type = other DNA
gcctcgccctgggag

SEQ ID NO: 16396 - DNA, 15 bp, synthetic construct
  source 1..15: mol_type = other DNA
tgggcctgtggctcg

SEQ ID NO: 16397 - DNA, 15 bp, synthetic construct
  source 1..15: mol_type = other DNA
gggcccgctactcac

SEQ ID NO: 16398 - DNA, 15 bp, synthetic construct
  source 1..15: mol_type = other DNA
gagctgcggcctccg

SEQ ID NO: 16399 - DNA, 15 bp, synthetic construct
  source 1..15: mol_type = other DNA
tccgtgactattgag

SEQ ID NO: 16400 - DNA, 15 bp, synthetic construct
  source 1..15: mol_type = other DNA
gtggactacagagtt

SEQ ID NO: 16401 - DNA, 15 bp, synthetic construct
  source 1..15: mol_type = other DNA
gatagtcagaggagc

SEQ ID NO: 16402 - DNA, 15 bp, synthetic construct
  source 1..15: mol_type = other DNA
actgggtggtgataa

SEQ ID NO: 16403 - DNA, 15 bp, synthetic construct
  source 1..15: mol_type = other DNA
ggctcctttattagc

SEQ ID NO: 16404 - DNA, 15 bp, synthetic construct
  source 1..15: mol_type = other DNA
tttgacagctgtatc

SEQ ID NO: 16405 - DNA, 15 bp, synthetic construct
  source 1..15: mol_type = other DNA
ttatggatgtcttgc

SEQ ID NO: 16406 - DNA, 15 bp, synthetic construct
  source 1..15: mol_type = other DNA
tattcaaattttctt

SEQ ID NO: 16407 - DNA, 15 bp, synthetic construct
  source 1..15: mol_type = other DNA
cattaactgcaaaga

SEQ ID NO: 16408 - DNA, 15 bp, synthetic construct
  source 1..15: mol_type = other DNA
ttaatgctaatgctc

SEQ ID NO: 16409 - DNA, 15 bp, synthetic construct
  source 1..15: mol_type = other DNA
atctgggcacttacc

SEQ ID NO: 16410 - DNA, 15 bp, synthetic construct
  source 1..15: mol_type = other DNA
cattgactgagttga

SEQ ID NO: 16411 - DNA, 15 bp, synthetic construct
  source 1..15: mol_type = other DNA
aatagggcccctcaa

SEQ ID NO: 16412 - DNA, 15 bp, synthetic construct
  source 1..15: mol_type = other DNA
ctaagatccacatag

SEQ ID NO: 16413 - DNA, 15 bp, synthetic construct
  source 1..15: mol_type = other DNA
agggaggaagtgagc

SEQ ID NO: 16414 - DNA, 15 bp, synthetic construct
  source 1..15: mol_type = other DNA
catttccagctcacg

SEQ ID NO: 16415 - DNA, 15 bp, synthetic construct
  source 1..15: mol_type = other DNA
ctccctatcaaatcc

SEQ ID NO: 16416 - DNA, 15 bp, synthetic construct
  source 1..15: mol_type = other DNA
gagcctggtaaccga

SEQ ID NO: 16417 - DNA, 15 bp, synthetic construct
  source 1..15: mol_type = other DNA
caagtcctatcctag

SEQ ID NO: 16418 - DNA, 15 bp, synthetic construct
  source 1..15: mol_type = other DNA
aggaaggcatatgac

SEQ ID NO: 16419 - DNA, 15 bp, synthetic construct
  source 1..15: mol_type = other DNA
ttcccattctgactg

SEQ ID NO: 16420 - DNA, 15 bp, synthetic construct
  source 1..15: mol_type = other DNA
actgaagcgctgaag

SEQ ID NO: 16421 - DNA, 15 bp, synthetic construct
  source 1..15: mol_type = other DNA
gtacacctgctccag

SEQ ID NO: 16422 - DNA, 15 bp, synthetic construct
  source 1..15: mol_type = other DNA
tccagacaatatcgc

SEQ ID NO: 16423 - DNA, 15 bp, synthetic construct
  source 1..15: mol_type = other DNA
cacagcagaatctcg

SEQ ID NO: 16424 - DNA, 15 bp, synthetic construct
  source 1..15: mol_type = other DNA
gcaggagccaaattc

SEQ ID NO: 16425 - DNA, 15 bp, synthetic construct
  source 1..15: mol_type = other DNA
tggactggtttatat

SEQ ID NO: 16426 - DNA, 15 bp, synthetic construct
  source 1..15: mol_type = other DNA
gtgaggatcacgatg

SEQ ID NO: 16427 - DNA, 15 bp, synthetic construct
  source 1..15: mol_type = other DNA
cagactgcagatgag

SEQ ID NO: 16428 - DNA, 15 bp, synthetic construct
  source 1..15: mol_type = other DNA
acccagttgacggta

SEQ ID NO: 16429 - DNA, 15 bp, synthetic construct
  source 1..15: mol_type = other DNA
ctttcatgggagtcc

SEQ ID NO: 16430 - DNA, 15 bp, synthetic construct
  source 1..15: mol_type = other DNA
tgtgatacctctgtg

SEQ ID NO: 16431 - DNA, 15 bp, synthetic construct
  source 1..15: mol_type = other DNA
gatataaagtaggaa

SEQ ID NO: 16432 - DNA, 15 bp, synthetic construct
  source 1..15: mol_type = other DNA
cttcgaagtgtacct

SEQ ID NO: 16433 - DNA, 15 bp, synthetic construct
  source 1..15: mol_type = other DNA
gcttctaggtcgcat

SEQ ID NO: 16434 - DNA, 15 bp, synthetic construct
  source 1..15: mol_type = other DNA
cgaggaagcccctga

SEQ ID NO: 16435 - DNA, 15 bp, synthetic construct
  source 1..15: mol_type = other DNA
ccctgcgcgtccagg

SEQ ID NO: 16436 - DNA, 15 bp, synthetic construct
  source 1..15: mol_type = other DNA
tctggttgtccttcc

SEQ ID NO: 16437 - DNA, 15 bp, synthetic construct
  source 1..15: mol_type = other DNA
gttttcttgtgtgga

SEQ ID NO: 16438 - DNA, 15 bp, synthetic construct
  source 1..15: mol_type = other DNA
caatttctaaacttt

SEQ ID NO: 16439 - DNA, 15 bp, synthetic construct
  source 1..15: mol_type = other DNA
cgttcctgaactaaa

SEQ ID NO: 16440 - DNA, 15 bp, synthetic construct
  source 1..15: mol_type = other DNA
gctggtcacctacta

SEQ ID NO: 16441 - DNA, 15 bp, synthetic construct
  source 1..15: mol_type = other DNA
acggcgtactcttcc

SEQ ID NO: 16442 - DNA, 15 bp, synthetic construct
  source 1..15: mol_type = other DNA
aggcttcttttccta

SEQ ID NO: 16443 - DNA, 15 bp, synthetic construct
  source 1..15: mol_type = other DNA
ctcgggttaagaaat

SEQ ID NO: 16444 - DNA, 15 bp, synthetic construct
  source 1..15: mol_type = other DNA
gggtttctcctcttg

SEQ ID NO: 16445 - DNA, 15 bp, synthetic construct
  source 1..15: mol_type = other DNA
gaggaaaccgctgtt

SEQ ID NO: 16446 - DNA, 15 bp, synthetic construct
  source 1..15: mol_type = other DNA
ccaaaacatgaaggg

SEQ ID NO: 16447 - DNA, 15 bp, synthetic construct
  source 1..15: mol_type = other DNA
cacaacaaaagaaca

SEQ ID NO: 16448 - DNA, 15 bp, synthetic construct
  source 1..15: mol_type = other DNA
cctctatcaccctca

SEQ ID NO: 16449 - DNA, 15 bp, synthetic construct
  source 1..15: mol_type = other DNA
tgttagggacactgc

SEQ ID NO: 16450 - DNA, 15 bp, synthetic construct
  source 1..15: mol_type = other DNA
cctctatcaccctca

SEQ ID NO: 16451 - DNA, 15 bp, synthetic construct
  source 1..15: mol_type = other DNA
tcaactgacgaaaac

SEQ ID NO: 16452 - DNA, 15 bp, synthetic construct
  source 1..15: mol_type = other DNA
ttcgtgagtttgaca

SEQ ID NO: 16453 - DNA, 15 bp, synthetic construct
  source 1..15: mol_type = other DNA
gtctccacagagatc

SEQ ID NO: 16454 - DNA, 15 bp, synthetic construct
  source 1..15: mol_type = other DNA
tagacccaggtgtcg

SEQ ID NO: 16455 - DNA, 15 bp, synthetic construct
  source 1..15: mol_type = other DNA
tgtgacctccaagtg

SEQ ID NO: 16456 - DNA, 15 bp, synthetic construct
  source 1..15: mol_type = other DNA
cactcaccctactat

SEQ ID NO: 16457 - DNA, 15 bp, synthetic construct
  source 1..15: mol_type = other DNA
ctttcttcttcatgg

SEQ ID NO: 16458 - DNA, 15 bp, synthetic construct
  source 1..15: mol_type = other DNA
gttgggcaacattga

SEQ ID NO: 16459 - DNA, 15 bp, synthetic construct
  source 1..15: mol_type = other DNA
gggagggtaaggatg

SEQ ID NO: 16460 - DNA, 15 bp, synthetic construct
  source 1..15: mol_type = other DNA
tacggcctgttcatg

SEQ ID NO: 16461 - DNA, 15 bp, synthetic construct
  source 1..15: mol_type = other DNA
gctcctataccttga

SEQ ID NO: 16462 - DNA, 15 bp, synthetic construct
  source 1..15: mol_type = other DNA
catttgtatttcata

SEQ ID NO: 16463 - DNA, 15 bp, synthetic construct
  source 1..15: mol_type = other DNA
atgggccacggctag

SEQ ID NO: 16464 - DNA, 15 bp, synthetic construct
  source 1..15: mol_type = other DNA
cgtgctgggttgaag

SEQ ID NO: 16465 - DNA, 15 bp, synthetic construct
  source 1..15: mol_type = other DNA
ggaatcagcacggtc

SEQ ID NO: 16466 - DNA, 15 bp, synthetic construct
  source 1..15: mol_type = other DNA
ggcgtgttctcctca

SEQ ID NO: 16467 - DNA, 15 bp, synthetic construct
  source 1..15: mol_type = other DNA
ctacctatgtttttc

SEQ ID NO: 16468 - DNA, 15 bp, synthetic construct
  source 1..15: mol_type = other DNA
acatgaggagttcta

SEQ ID NO: 16469 - DNA, 15 bp, synthetic construct
  source 1..15: mol_type = other DNA
tccgtcttatagtgc

SEQ ID NO: 16470 - DNA, 15 bp, synthetic construct
  source 1..15: mol_type = other DNA
cgtgcgtggtgaaca

SEQ ID NO: 16471 - DNA, 15 bp, synthetic construct
  source 1..15: mol_type = other DNA
acagatttgtctcca

SEQ ID NO: 16472 - DNA, 15 bp, synthetic construct
  source 1..15: mol_type = other DNA
tacctgtgaagtgta

SEQ ID NO: 16473 - DNA, 15 bp, synthetic construct
  source 1..15: mol_type = other DNA
gaaccagggaaaatg

SEQ ID NO: 16474 - DNA, 15 bp, synthetic construct
  source 1..15: mol_type = other DNA
tcccatgcagggtat

SEQ ID NO: 16475 - DNA, 15 bp, synthetic construct
  source 1..15: mol_type = other DNA
aaagtcactaactcc

SEQ ID NO: 16476 - DNA, 15 bp, synthetic construct
  source 1..15: mol_type = other DNA
ttctactcagctttc

SEQ ID NO: 16477 - DNA, 15 bp, synthetic construct
  source 1..15: mol_type = other DNA
atagacctccactct

SEQ ID NO: 16478 - DNA, 15 bp, synthetic construct
  source 1..15: mol_type = other DNA
cacgtgtagaatggg

SEQ ID NO: 16479 - DNA, 15 bp, synthetic construct
  source 1..15: mol_type = other DNA
cttacttaatctggc

SEQ ID NO: 16480 - DNA, 15 bp, synthetic construct
  source 1..15: mol_type = other DNA
acaccacttgagtcc

SEQ ID NO: 16481 - DNA, 15 bp, synthetic construct
  source 1..15: mol_type = other DNA
aggcggatcctgtcc

SEQ ID NO: 16482 - DNA, 15 bp, synthetic construct
  source 1..15: mol_type = other DNA
tgcaggatgagtgtc

SEQ ID NO: 16483 - DNA, 15 bp, synthetic construct
  source 1..15: mol_type = other DNA
aatgctttctcacag

SEQ ID NO: 16484 - DNA, 15 bp, synthetic construct
  source 1..15: mol_type = other DNA
gtattcttgcacaaa

SEQ ID NO: 16485 - DNA, 15 bp, synthetic construct
  source 1..15: mol_type = other DNA
aatgcccctttacgc

SEQ ID NO: 16486 - DNA, 15 bp, synthetic construct
  source 1..15: mol_type = other DNA
cttttcaggaaaacc

SEQ ID NO: 16487 - DNA, 15 bp, synthetic construct
  source 1..15: mol_type = other DNA
tgctgataatcgagt

SEQ ID NO: 16488 - DNA, 15 bp, synthetic construct
  source 1..15: mol_type = other DNA
gagatgtccacgcta

SEQ ID NO: 16489 - DNA, 15 bp, synthetic construct
  source 1..15: mol_type = other DNA
cctcgccggacctcc

SEQ ID NO: 16490 - DNA, 15 bp, synthetic construct
  source 1..15: mol_type = other DNA
ccttcccatcgtgta

SEQ ID NO: 16491 - DNA, 15 bp, synthetic construct
  source 1..15: mol_type = other DNA
cgcagttccatctag

SEQ ID NO: 16492 - DNA, 15 bp, synthetic construct
  source 1..15: mol_type = other DNA
tagatcagggacact

SEQ ID NO: 16493 - DNA, 15 bp, synthetic construct
  source 1..15: mol_type = other DNA
ttgcactctgttcgg

SEQ ID NO: 16494 - DNA, 15 bp, synthetic construct
  source 1..15: mol_type = other DNA
acgtcccttagtaac

SEQ ID NO: 16495 - DNA, 15 bp, synthetic construct
  source 1..15: mol_type = other DNA
cgtggtgtggcgaag

SEQ ID NO: 16496 - DNA, 15 bp, synthetic construct
  source 1..15: mol_type = other DNA
tgcagcagcggattc

SEQ ID NO: 16497 - DNA, 15 bp, synthetic construct
  source 1..15: mol_type = other DNA
aatctgctgcttcat

SEQ ID NO: 16498 - DNA, 15 bp, synthetic construct
  source 1..15: mol_type = other DNA
ggagtgccggcatgg

SEQ ID NO: 16499 - DNA, 15 bp, synthetic construct
  source 1..15: mol_type = other DNA
atggccggtgggtag

SEQ ID NO: 16500 - DNA, 15 bp, synthetic construct
  source 1..15: mol_type = other DNA
atgggaggcctgaac

SEQ ID NO: 16501 - DNA, 15 bp, synthetic construct
  source 1..15: mol_type = other DNA
ggttcatgatgttca

SEQ ID NO: 16502 - DNA, 15 bp, synthetic construct
  source 1..15: mol_type = other DNA
tcaaacccgcagcta

SEQ ID NO: 16503 - DNA, 15 bp, synthetic construct
  source 1..15: mol_type = other DNA
catgccgggctgatt

SEQ ID NO: 16504 - DNA, 15 bp, synthetic construct
  source 1..15: mol_type = other DNA
cccaggcctgtgata

SEQ ID NO: 16505 - DNA, 15 bp, synthetic construct
  source 1..15: mol_type = other DNA
ggtgagatgctcctg

SEQ ID NO: 16506 - DNA, 15 bp, synthetic construct
  source 1..15: mol_type = other DNA
caacaacagcatgcc

SEQ ID NO: 16507 - DNA, 15 bp, synthetic construct
  source 1..15: mol_type = other DNA
cattcaggctcacgg

SEQ ID NO: 16508 - DNA, 15 bp, synthetic construct
  source 1..15: mol_type = other DNA
cgtgagcatgtcacc

SEQ ID NO: 16509 - DNA, 15 bp, synthetic construct
  source 1..15: mol_type = other DNA
ctgccgagccgcttc

SEQ ID NO: 16510 - DNA, 15 bp, synthetic construct
  source 1..15: mol_type = other DNA
aacacccgcaacgtg

SEQ ID NO: 16511 - DNA, 15 bp, synthetic construct
  source 1..15: mol_type = other DNA
taggagaaggcagac

SEQ ID NO: 16512 - DNA, 15 bp, synthetic construct
  source 1..15: mol_type = other DNA
gaagcgggtggtgca

SEQ ID NO: 16513 - DNA, 15 bp, synthetic construct
  source 1..15: mol_type = other DNA
ccgttggtcttgcgt

SEQ ID NO: 16514 - DNA, 15 bp, synthetic construct
  source 1..15: mol_type = other DNA
ctacgacctctgcat

SEQ ID NO: 16515 - DNA, 15 bp, synthetic construct
  source 1..15: mol_type = other DNA
ggcatggctcttcgt

SEQ ID NO: 16516 - DNA, 15 bp, synthetic construct
  source 1..15: mol_type = other DNA
ctgggtctcctatcc

SEQ ID NO: 16517 - DNA, 15 bp, synthetic construct
  source 1..15: mol_type = other DNA
ggaggagtcagtgca

SEQ ID NO: 16518 - DNA, 15 bp, synthetic construct
  source 1..15: mol_type = other DNA
gttctcctccttgcg

SEQ ID NO: 16519 - DNA, 15 bp, synthetic construct
  source 1..15: mol_type = other DNA
ggtgtagacaaagcg

SEQ ID NO: 16520 - DNA, 15 bp, synthetic construct
  source 1..15: mol_type = other DNA
gtgtgggactaaagc

SEQ ID NO: 16521 - DNA, 15 bp, synthetic construct
  source 1..15: mol_type = other DNA
gaacaaaattggtga

SEQ ID NO: 16522 - DNA, 15 bp, synthetic construct
  source 1..15: mol_type = other DNA
ccaacgtgtccaatg

SEQ ID NO: 16523 - DNA, 15 bp, synthetic construct
  source 1..15: mol_type = other DNA
ccatggtggcataca

SEQ ID NO: 16524 - DNA, 15 bp, synthetic construct
  source 1..15: mol_type = other DNA
tggtgacctactttg

SEQ ID NO: 16525 - DNA, 15 bp, synthetic construct
  source 1..15: mol_type = other DNA
taacagtcgacacgc

SEQ ID NO: 16526 - DNA, 15 bp, synthetic construct
  source 1..15: mol_type = other DNA
aggatattttcaaac

SEQ ID NO: 16527 - DNA, 15 bp, synthetic construct
  source 1..15: mol_type = other DNA
aatagggcagttcct

SEQ ID NO: 16528 - DNA, 15 bp, synthetic construct
  source 1..15: mol_type = other DNA
tgttgcacacatagg

SEQ ID NO: 16529 - DNA, 15 bp, synthetic construct
  source 1..15: mol_type = other DNA
ctcataagtgaaggt

SEQ ID NO: 16530 - DNA, 15 bp, synthetic construct
  source 1..15: mol_type = other DNA
gaaggagatgattac

SEQ ID NO: 16531 - DNA, 15 bp, synthetic construct
  source 1..15: mol_type = other DNA
tcatggatgatccgc

SEQ ID NO: 16532 - DNA, 15 bp, synthetic construct
  source 1..15: mol_type = other DNA
gctcctctgctataa

SEQ ID NO: 16533 - DNA, 15 bp, synthetic construct
  source 1..15: mol_type = other DNA
aaataaaaacgcata

SEQ ID NO: 16534 - DNA, 15 bp, synthetic construct
  source 1..15: mol_type = other DNA
tgagttaaacatgtg

SEQ ID NO: 16535 - DNA, 15 bp, synthetic construct
  source 1..15: mol_type = other DNA
gagccctggtctatc

SEQ ID NO: 16536 - DNA, 15 bp, synthetic construct
  source 1..15: mol_type = other DNA
cagcctttgtaaatg

SEQ ID NO: 16537 - DNA, 15 bp, synthetic construct
  source 1..15: mol_type = other DNA
ctcaagagctttgca

SEQ ID NO: 16538 - DNA, 15 bp, synthetic construct
  source 1..15: mol_type = other DNA
gaccgagtgaacaaa

SEQ ID NO: 16539 - DNA, 15 bp, synthetic construct
  source 1..15: mol_type = other DNA
ccgtgacttcatccc

SEQ ID NO: 16540 - DNA, 15 bp, synthetic construct
  source 1..15: mol_type = other DNA
gcctgtgctgcaaag

SEQ ID NO: 16541 - DNA, 15 bp, synthetic construct
  source 1..15: mol_type = other DNA
aatgtgcagtccagg

SEQ ID NO: 16542 - DNA, 15 bp, synthetic construct
  source 1..15: mol_type = other DNA
gaatcaaagcagtct

SEQ ID NO: 16543 - DNA, 15 bp, synthetic construct
  source 1..15: mol_type = other DNA
aatcgctgaattctt

SEQ ID NO: 16544 - DNA, 15 bp, synthetic construct
  source 1..15: mol_type = other DNA
ttctacaagtgactc

SEQ ID NO: 16545 - DNA, 15 bp, synthetic construct
  source 1..15: mol_type = other DNA
tttacccacaaccca

SEQ ID NO: 16546 - DNA, 15 bp, synthetic construct
  source 1..15: mol_type = other DNA
gtctttttgtttgaa

SEQ ID NO: 16547 - DNA, 15 bp, synthetic construct
  source 1..15: mol_type = other DNA
aggtcaccctccctc

SEQ ID NO: 16548 - DNA, 15 bp, synthetic construct
  source 1..15: mol_type = other DNA
aatcaaccaacaacg

SEQ ID NO: 16549 - DNA, 15 bp, synthetic construct
  source 1..15: mol_type = other DNA
tgataacataactcc

SEQ ID NO: 16550 - DNA, 15 bp, synthetic construct
  source 1..15: mol_type = other DNA
accattcctcgcgat

SEQ ID NO: 16551 - DNA, 15 bp, synthetic construct
  source 1..15: mol_type = other DNA
tgacgcttacctatt

SEQ ID NO: 16552 - DNA, 15 bp, synthetic construct
  source 1..15: mol_type = other DNA
tatcccaaaatgtct

SEQ ID NO: 16553 - DNA, 15 bp, synthetic construct
  source 1..15: mol_type = other DNA
ccaggaaaattcact

SEQ ID NO: 16554 - DNA, 15 bp, synthetic construct
  source 1..15: mol_type = other DNA
catggacctctccac

SEQ ID NO: 16555 - DNA, 15 bp, synthetic construct
  source 1..15: mol_type = other DNA
tcgggatgtcttgcg

SEQ ID NO: 16556 - DNA, 15 bp, synthetic construct
  source 1..15: mol_type = other DNA
ggtgctttctgtttc

SEQ ID NO: 16557 - DNA, 15 bp, synthetic construct
  source 1..15: mol_type = other DNA
acactcagaagtcac

SEQ ID NO: 16558 - DNA, 15 bp, synthetic construct
  source 1..15: mol_type = other DNA
attccgttttaaatg

SEQ ID NO: 16559 - DNA, 15 bp, synthetic construct
  source 1..15: mol_type = other DNA
tggaatcctaacacc

SEQ ID NO: 16560 - DNA, 15 bp, synthetic construct
  source 1..15: mol_type = other DNA
gatgatggaggagga

SEQ ID NO: 16561 - DNA, 15 bp, synthetic construct
  source 1..15: mol_type = other DNA
tccattggttctgat

SEQ ID NO: 16562 - DNA, 15 bp, synthetic construct
  source 1..15: mol_type = other DNA
aacaccaagtacttt

SEQ ID NO: 16563 - DNA, 15 bp, synthetic construct
  source 1..15: mol_type = other DNA
ttgcgatacgcagtc

SEQ ID NO: 16564 - DNA, 15 bp, synthetic construct
  source 1..15: mol_type = other DNA
ttactgaagtcagtg

SEQ ID NO: 16565 - DNA, 15 bp, synthetic construct
  source 1..15: mol_type = other DNA
tcttggcccaaaaac

SEQ ID NO: 16566 - DNA, 15 bp, synthetic construct
  source 1..15: mol_type = other DNA
ccatcaactcctgtg

SEQ ID NO: 16567 - DNA, 15 bp, synthetic construct
  source 1..15: mol_type = other DNA
gagtctgcccggaag

SEQ ID NO: 16568 - DNA, 15 bp, synthetic construct
  source 1..15: mol_type = other DNA
ccatactctgtccat

SEQ ID NO: 16569 - DNA, 15 bp, synthetic construct
  source 1..15: mol_type = other DNA
ttcctagggagccac

SEQ ID NO: 16570 - DNA, 15 bp, synthetic construct
  source 1..15: mol_type = other DNA
tccgaactacagctc

SEQ ID NO: 16571 - DNA, 15 bp, synthetic construct
  source 1..15: mol_type = other DNA
aattctgctgcttag

SEQ ID NO: 16572 - DNA, 15 bp, synthetic construct
  source 1..15: mol_type = other DNA
tctgttttcctgtgg

SEQ ID NO: 16573 - DNA, 15 bp, synthetic construct
  source 1..15: mol_type = other DNA
aaagggttagaaaga

SEQ ID NO: 16574 - DNA, 15 bp, synthetic construct
  source 1..15: mol_type = other DNA
ttaagtttgaagtcc

SEQ ID NO: 16575 - DNA, 15 bp, synthetic construct
  source 1..15: mol_type = other DNA
agtaggaaataaaat

SEQ ID NO: 16576 - DNA, 15 bp, synthetic construct
  source 1..15: mol_type = other DNA
cattcagttgctttt

SEQ ID NO: 16577 - DNA, 15 bp, synthetic construct
  source 1..15: mol_type = other DNA
cagacaaatgtagtg

SEQ ID NO: 16578 - DNA, 15 bp, synthetic construct
  source 1..15: mol_type = other DNA
accccatgtctttaa

SEQ ID NO: 16579 - DNA, 15 bp, synthetic construct
  source 1..15: mol_type = other DNA
ataaaatcaaacatc

SEQ ID NO: 16580 - DNA, 15 bp, synthetic construct
  source 1..15: mol_type = other DNA
tagacaaagtgtgtt

SEQ ID NO: 16581 - DNA, 15 bp, synthetic construct
  source 1..15: mol_type = other DNA
aaagaatcagttttg

SEQ ID NO: 16582 - DNA, 15 bp, synthetic construct
  source 1..15: mol_type = other DNA
tggttatctgtcatc

SEQ ID NO: 16583 - DNA, 15 bp, synthetic construct
  source 1..15: mol_type = other DNA
taagaacgaagttga

SEQ ID NO: 16584 - DNA, 15 bp, synthetic construct
  source 1..15: mol_type = other DNA
gtggaattcaaaaca

SEQ ID NO: 16585 - DNA, 15 bp, synthetic construct
  source 1..15: mol_type = other DNA
aaagaagtggcattc

SEQ ID NO: 16586 - DNA, 15 bp, synthetic construct
  source 1..15: mol_type = other DNA
aatgagtccttcagc

SEQ ID NO: 16587 - DNA, 15 bp, synthetic construct
  source 1..15: mol_type = other DNA
catctccaagcttct

SEQ ID NO: 16588 - DNA, 15 bp, synthetic construct
  source 1..15: mol_type = other DNA
ccattttcttatgga

SEQ ID NO: 16589 - DNA, 15 bp, synthetic construct
  source 1..15: mol_type = other DNA
aggagttccaaaaac

SEQ ID NO: 16590 - DNA, 15 bp, synthetic construct
  source 1..15: mol_type = other DNA
acatcagtgggaatt

SEQ ID NO: 16591 - DNA, 15 bp, synthetic construct
  source 1..15: mol_type = other DNA
tcaaaacgtttttca

SEQ ID NO: 16592 - DNA, 15 bp, synthetic construct
  source 1..15: mol_type = other DNA
tggaactctgagagg

SEQ ID NO: 16593 - DNA, 15 bp, synthetic construct
  source 1..15: mol_type = other DNA
tactgacacactttt

SEQ ID NO: 16594 - DNA, 15 bp, synthetic construct
  source 1..15: mol_type = other DNA
tggacagccctttag

SEQ ID NO: 16595 - DNA, 15 bp, synthetic construct
  source 1..15: mol_type = other DNA
cacgttggtgactga

SEQ ID NO: 16596 - DNA, 15 bp, synthetic construct
  source 1..15: mol_type = other DNA
ggaaactgtgtgagc

SEQ ID NO: 16597 - DNA, 15 bp, synthetic construct
  source 1..15: mol_type = other DNA
agtgcttcagttcac

SEQ ID NO: 16598 - DNA, 15 bp, synthetic construct
  source 1..15: mol_type = other DNA
cctcaatagtaactc

SEQ ID NO: 16599 - DNA, 15 bp, synthetic construct
  source 1..15: mol_type = other DNA
aagcctgattaatta

SEQ ID NO: 16600 - DNA, 15 bp, synthetic construct
  source 1..15: mol_type = other DNA
agggagattcttcag

SEQ ID NO: 16601 - DNA, 15 bp, synthetic construct
  source 1..15: mol_type = other DNA
ttgcggattcagtgc

SEQ ID NO: 16602 - DNA, 15 bp, synthetic construct
  source 1..15: mol_type = other DNA
actgtcggagcttct

SEQ ID NO: 16603 - DNA, 15 bp, synthetic construct
  source 1..15: mol_type = other DNA
ctattcctgggttga

SEQ ID NO: 16604 - DNA, 15 bp, synthetic construct
  source 1..15: mol_type = other DNA
aagatcatagaaacg

SEQ ID NO: 16605 - DNA, 15 bp, synthetic construct
  source 1..15: mol_type = other DNA
gctcccggctcgatc

SEQ ID NO: 16606 - DNA, 15 bp, synthetic construct
  source 1..15: mol_type = other DNA
ctgttttcgcgagca

SEQ ID NO: 16607 - DNA, 15 bp, synthetic construct
  source 1..15: mol_type = other DNA
gtcatgagtacagcc

SEQ ID NO: 16608 - DNA, 15 bp, synthetic construct
  source 1..15: mol_type = other DNA
agcttggtgatactc

SEQ ID NO: 16609 - DNA, 15 bp, synthetic construct
  source 1..15: mol_type = other DNA
cgctcgacctgaagc

SEQ ID NO: 16610 - DNA, 15 bp, synthetic construct
  source 1..15: mol_type = other DNA
tgctggtggacacac

SEQ ID NO: 16611 - DNA, 15 bp, synthetic construct
  source 1..15: mol_type = other DNA
acactccagcacacc

SEQ ID NO: 16612 - DNA, 15 bp, synthetic construct
  source 1..15: mol_type = other DNA
ctccggaactctcac

SEQ ID NO: 16613 - DNA, 15 bp, synthetic construct
  source 1..15: mol_type = other DNA
gaccttgactagccc

SEQ ID NO: 16614 - DNA, 15 bp, synthetic construct
  source 1..15: mol_type = other DNA
gactccacactactc

SEQ ID NO: 16615 - DNA, 15 bp, synthetic construct
  source 1..15: mol_type = other DNA
gtagtgtggagtctg

SEQ ID NO: 16616 - DNA, 15 bp, synthetic construct
  source 1..15: mol_type = other DNA
tggcgttgaaacctc

SEQ ID NO: 16617 - DNA, 15 bp, synthetic construct
  source 1..15: mol_type = other DNA
gtcaagcccgagaag

SEQ ID NO: 16618 - DNA, 15 bp, synthetic construct
  source 1..15: mol_type = other DNA
tggatcttcaggttc

SEQ ID NO: 16619 - DNA, 15 bp, synthetic construct
  source 1..15: mol_type = other DNA
gtcaagcccgagaag

SEQ ID NO: 16620 - DNA, 15 bp, synthetic construct
  source 1..15: mol_type = other DNA
tggatcttcaggttc

SEQ ID NO: 16621 - DNA, 15 bp, synthetic construct
  source 1..15: mol_type = other DNA
ctcatccacatccgc

SEQ ID NO: 16622 - DNA, 15 bp, synthetic construct
  source 1..15: mol_type = other DNA
tcaacccttatctct

SEQ ID NO: 16623 - DNA, 15 bp, synthetic construct
  source 1..15: mol_type = other DNA
ttcccagggagtgct

SEQ ID NO: 16624 - DNA, 15 bp, synthetic construct
  source 1..15: mol_type = other DNA
agggcttgtccacat

SEQ ID NO: 16625 - DNA, 15 bp, synthetic construct
  source 1..15: mol_type = other DNA
tacgagggctgcaac

SEQ ID NO: 16626 - DNA, 15 bp, synthetic construct
  source 1..15: mol_type = other DNA
gatctgggccccact

SEQ ID NO: 16627 - DNA, 15 bp, synthetic construct
  source 1..15: mol_type = other DNA
ggcggcccctatgtc

SEQ ID NO: 16628 - DNA, 15 bp, synthetic construct
  source 1..15: mol_type = other DNA
ggttcttggccagat

SEQ ID NO: 16629 - DNA, 15 bp, synthetic construct
  source 1..15: mol_type = other DNA
ggcctgtggcaacgg

SEQ ID NO: 16630 - DNA, 15 bp, synthetic construct
  source 1..15: mol_type = other DNA
gctctccgtcctttc

SEQ ID NO: 16631 - DNA, 15 bp, synthetic construct
  source 1..15: mol_type = other DNA
cggactgggcttgcc

SEQ ID NO: 16632 - DNA, 15 bp, synthetic construct
  source 1..15: mol_type = other DNA
gcagctgagttgacg

SEQ ID NO: 16633 - DNA, 15 bp, synthetic construct
  source 1..15: mol_type = other DNA
gccccgatggactcc

SEQ ID NO: 16634 - DNA, 15 bp, synthetic construct
  source 1..15: mol_type = other DNA
cccgggcagtaggac

SEQ ID NO: 16635 - DNA, 15 bp, synthetic construct
  source 1..15: mol_type = other DNA
aaccgcgtccacttc

SEQ ID NO: 16636 - DNA, 15 bp, synthetic construct
  source 1..15: mol_type = other DNA
cgacagcgcgtggta

SEQ ID NO: 16637 - DNA, 15 bp, synthetic construct
  source 1..15: mol_type = other DNA
tagcggtggtgctgg

SEQ ID NO: 16638 - DNA, 15 bp, synthetic construct
  source 1..15: mol_type = other DNA
aaccgaggatcaacg

SEQ ID NO: 16639 - DNA, 15 bp, synthetic construct
  source 1..15: mol_type = other DNA
agggatcattctcat

SEQ ID NO: 16640 - DNA, 15 bp, synthetic construct
  source 1..15: mol_type = other DNA
gactccgtactggaa

SEQ ID NO: 16641 - DNA, 15 bp, synthetic construct
  source 1..15: mol_type = other DNA
agggatcattctcat

SEQ ID NO: 16642 - DNA, 15 bp, synthetic construct
  source 1..15: mol_type = other DNA
gactccgtactggaa

SEQ ID NO: 16643 - DNA, 15 bp, synthetic construct
  source 1..15: mol_type = other DNA
tttctgacttgcagt

SEQ ID NO: 16644 - DNA, 15 bp, synthetic construct
  source 1..15: mol_type = other DNA
aggctcctactcatg

SEQ ID NO: 16645 - DNA, 15 bp, synthetic construct
  source 1..15: mol_type = other DNA
tgtgttgtgactatt

SEQ ID NO: 16646 - DNA, 15 bp, synthetic construct
  source 1..15: mol_type = other DNA
tttaccctcttccta

SEQ ID NO: 16647 - DNA, 15 bp, synthetic construct
  source 1..15: mol_type = other DNA
agggtatatacagca

SEQ ID NO: 16648 - DNA, 15 bp, synthetic construct
  source 1..15: mol_type = other DNA
gatgtgccagttatc

SEQ ID NO: 16649 - DNA, 15 bp, synthetic construct
  source 1..15: mol_type = other DNA
tctctcttttcaggt

SEQ ID NO: 16650 - DNA, 15 bp, synthetic construct
  source 1..15: mol_type = other DNA
tcaaattgcccctca

SEQ ID NO: 16651 - DNA, 15 bp, synthetic construct
  source 1..15: mol_type = other DNA
caatagccccgtcat

SEQ ID NO: 16652 - DNA, 15 bp, synthetic construct
  source 1..15: mol_type = other DNA
gcagactggcctgta

SEQ ID NO: 16653 - DNA, 15 bp, synthetic construct
  source 1..15: mol_type = other DNA
ccgggcctgctctat

SEQ ID NO: 16654 - DNA, 15 bp, synthetic construct
  source 1..15: mol_type = other DNA
gagcatgcaggactg

SEQ ID NO: 16655 - DNA, 15 bp, synthetic construct
  source 1..15: mol_type = other DNA
tgagctggaagaggg

SEQ ID NO: 16656 - DNA, 15 bp, synthetic construct
  source 1..15: mol_type = other DNA
cagggcggcccactt

SEQ ID NO: 16657 - DNA, 15 bp, synthetic construct
  source 1..15: mol_type = other DNA
attgtttctttttct

SEQ ID NO: 16658 - DNA, 15 bp, synthetic construct
  source 1..15: mol_type = other DNA
accctatggcagagc

SEQ ID NO: 16659 - DNA, 15 bp, synthetic construct
  source 1..15: mol_type = other DNA
cagggacagagatgg

SEQ ID NO: 16660 - DNA, 15 bp, synthetic construct
  source 1..15: mol_type = other DNA
gtcccgtcccccagt

SEQ ID NO: 16661 - DNA, 15 bp, synthetic construct
  source 1..15: mol_type = other DNA
tgcctcactgtgctg

SEQ ID NO: 16662 - DNA, 15 bp, synthetic construct
  source 1..15: mol_type = other DNA
cagcggtggatctgc

SEQ ID NO: 16663 - DNA, 15 bp, synthetic construct
  source 1..15: mol_type = other DNA
cctggcttgagcatg

SEQ ID NO: 16664 - DNA, 15 bp, synthetic construct
  source 1..15: mol_type = other DNA
ggctcggtgccagtc

SEQ ID NO: 16665 - DNA, 15 bp, synthetic construct
  source 1..15: mol_type = other DNA
gctctgctctttatt

SEQ ID NO: 16666 - DNA, 15 bp, synthetic construct
  source 1..15: mol_type = other DNA
tggccactgggaggt

SEQ ID NO: 16667 - DNA, 15 bp, synthetic construct
  source 1..15: mol_type = other DNA
aacgtgtcttgtaag

SEQ ID NO: 16668 - DNA, 15 bp, synthetic construct
  source 1..15: mol_type = other DNA
cccagaatagggttc

SEQ ID NO: 16669 - DNA, 15 bp, synthetic construct
  source 1..15: mol_type = other DNA
agagttttggtctcc

SEQ ID NO: 16670 - DNA, 15 bp, synthetic construct
  source 1..15: mol_type = other DNA
gcctatgatacttgg

SEQ ID NO: 16671 - DNA, 15 bp, synthetic construct
  source 1..15: mol_type = other DNA
gtcattgttaatcaa

SEQ ID NO: 16672 - DNA, 15 bp, synthetic construct
  source 1..15: mol_type = other DNA
tacccgttcctcatc

SEQ ID NO: 16673 - DNA, 15 bp, synthetic construct
  source 1..15: mol_type = other DNA
tacatcagcctactg

SEQ ID NO: 16674 - DNA, 15 bp, synthetic construct
  source 1..15: mol_type = other DNA
acactacgctatgtt

SEQ ID NO: 16675 - DNA, 15 bp, synthetic construct
  source 1..15: mol_type = other DNA
cattgaccacactag

SEQ ID NO: 16676 - DNA, 15 bp, synthetic construct
  source 1..15: mol_type = other DNA
acccagccattcacc

SEQ ID NO: 16677 - DNA, 15 bp, synthetic construct
  source 1..15: mol_type = other DNA
ccagtagttaaaact

SEQ ID NO: 16678 - DNA, 15 bp, synthetic construct
  source 1..15: mol_type = other DNA
tgcccacctaaaact

SEQ ID NO: 16679 - DNA, 15 bp, synthetic construct
  source 1..15: mol_type = other DNA
tgcccacctaaaact

SEQ ID NO: 16680 - DNA, 15 bp, synthetic construct
  source 1..15: mol_type = other DNA
tacaggaaaaacagc

SEQ ID NO: 16681 - DNA, 15 bp, synthetic construct
  source 1..15: mol_type = other DNA
tcacgttcctctcct

SEQ ID NO: 16682 - DNA, 15 bp, synthetic construct
  source 1..15: mol_type = other DNA
cagcagttcacagat

SEQ ID NO: 16683 - DNA, 15 bp, synthetic construct
  source 1..15: mol_type = other DNA
atgggctactccgtg

SEQ ID NO: 16684 - DNA, 15 bp, synthetic construct
  source 1..15: mol_type = other DNA
caagagttttctcct

SEQ ID NO: 16685 - DNA, 15 bp, synthetic construct
  source 1..15: mol_type = other DNA
gtggattctgtactg

SEQ ID NO: 16686 - DNA, 15 bp, synthetic construct
  source 1..15: mol_type = other DNA
ctgtgtgtcatgatt

SEQ ID NO: 16687 - DNA, 15 bp, synthetic construct
  source 1..15: mol_type = other DNA
gtatcaggtacatca

SEQ ID NO: 16688 - DNA, 15 bp, synthetic construct
  source 1..15: mol_type = other DNA
aactctggccgtatg

SEQ ID NO: 16689 - DNA, 15 bp, synthetic construct
  source 1..15: mol_type = other DNA
tattccagaaagccc

SEQ ID NO: 16690 - DNA, 15 bp, synthetic construct
  source 1..15: mol_type = other DNA
gcggtcgctgtgtac

SEQ ID NO: 16691 - DNA, 15 bp, synthetic construct
  source 1..15: mol_type = other DNA
agggtacggagtcgg

SEQ ID NO: 16692 - DNA, 15 bp, synthetic construct
  source 1..15: mol_type = other DNA
taattagcagtcagt

SEQ ID NO: 16693 - DNA, 15 bp, synthetic construct
  source 1..15: mol_type = other DNA
acaacccacttctat

SEQ ID NO: 16694 - DNA, 15 bp, synthetic construct
  source 1..15: mol_type = other DNA
cttaccctcttcagc

SEQ ID NO: 16695 - DNA, 15 bp, synthetic construct
  source 1..15: mol_type = other DNA
acagccaggattaaa

SEQ ID NO: 16696 - DNA, 15 bp, synthetic construct
  source 1..15: mol_type = other DNA
gtacagcagtactag

SEQ ID NO: 16697 - DNA, 15 bp, synthetic construct
  source 1..15: mol_type = other DNA
tatttagaaaacgga

SEQ ID NO: 16698 - DNA, 15 bp, synthetic construct
  source 1..15: mol_type = other DNA
tgaaaagtagattga

SEQ ID NO: 16699 - DNA, 15 bp, synthetic construct
  source 1..15: mol_type = other DNA
agagctcagtaaggt

SEQ ID NO: 16700 - DNA, 15 bp, synthetic construct
  source 1..15: mol_type = other DNA
ggagggtgtttttct

SEQ ID NO: 16701 - DNA, 15 bp, synthetic construct
  source 1..15: mol_type = other DNA
cctctggtaaaagag

SEQ ID NO: 16702 - DNA, 15 bp, synthetic construct
  source 1..15: mol_type = other DNA
gagactcaactatcc

SEQ ID NO: 16703 - DNA, 15 bp, synthetic construct
  source 1..15: mol_type = other DNA
tttccagcaaaccgg

SEQ ID NO: 16704 - DNA, 15 bp, synthetic construct
  source 1..15: mol_type = other DNA
tttcttatgtacaga

SEQ ID NO: 16705 - DNA, 15 bp, synthetic construct
  source 1..15: mol_type = other DNA
cctccatccaagtcc

SEQ ID NO: 16706 - DNA, 15 bp, synthetic construct
  source 1..15: mol_type = other DNA
accccttcctacacg

SEQ ID NO: 16707 - DNA, 15 bp, synthetic construct
  source 1..15: mol_type = other DNA
agcagtgcaaatcgg

SEQ ID NO: 16708 - DNA, 15 bp, synthetic construct
  source 1..15: mol_type = other DNA
tgcaaatcagagaag

SEQ ID NO: 16709 - DNA, 15 bp, synthetic construct
  source 1..15: mol_type = other DNA
agctcatggttaagg

SEQ ID NO: 16710 - DNA, 15 bp, synthetic construct
  source 1..15: mol_type = other DNA
aaacccatgccactt

SEQ ID NO: 16711 - DNA, 15 bp, synthetic construct
  source 1..15: mol_type = other DNA
atgcaaagttgattt

SEQ ID NO: 16712 - DNA, 15 bp, synthetic construct
  source 1..15: mol_type = other DNA
tatcaaggagactag

SEQ ID NO: 16713 - DNA, 15 bp, synthetic construct
  source 1..15: mol_type = other DNA
ctccccaaagcttct

SEQ ID NO: 16714 - DNA, 15 bp, synthetic construct
  source 1..15: mol_type = other DNA
gacatgaaggtgtcg

SEQ ID NO: 16715 - DNA, 15 bp, synthetic construct
  source 1..15: mol_type = other DNA
gtacatgaagacctt

SEQ ID NO: 16716 - DNA, 15 bp, synthetic construct
  source 1..15: mol_type = other DNA
cagctcaaggctatg

SEQ ID NO: 16717 - DNA, 15 bp, synthetic construct
  source 1..15: mol_type = other DNA
tatatcccctgcgtc

SEQ ID NO: 16718 - DNA, 15 bp, synthetic construct
  source 1..15: mol_type = other DNA
ctgtctgtccctgtg

SEQ ID NO: 16719 - DNA, 15 bp, synthetic construct
  source 1..15: mol_type = other DNA
tgaagtcctgtttgc

SEQ ID NO: 16720 - DNA, 15 bp, synthetic construct
  source 1..15: mol_type = other DNA
actacgtctacaacc

SEQ ID NO: 16721 - DNA, 15 bp, synthetic construct
  source 1..15: mol_type = other DNA
tgaagtcctgtttgc

SEQ ID NO: 16722 - DNA, 15 bp, synthetic construct
  source 1..15: mol_type = other DNA
actacgtctacaacc

SEQ ID NO: 16723 - DNA, 15 bp, synthetic construct
  source 1..15: mol_type = other DNA
actacgtctacaacc

SEQ ID NO: 16724 - DNA, 15 bp, synthetic construct
  source 1..15: mol_type = other DNA
gctggtaccgcttcg

SEQ ID NO: 16725 - DNA, 15 bp, synthetic construct
  source 1..15: mol_type = other DNA
tcgctggacggatgc

SEQ ID NO: 16726 - DNA, 15 bp, synthetic construct
  source 1..15: mol_type = other DNA
cctggacgagtactg

SEQ ID NO: 16727 - DNA, 15 bp, synthetic construct
  source 1..15: mol_type = other DNA
gtgtcgcaggcgtag

SEQ ID NO: 16728 - DNA, 15 bp, synthetic construct
  source 1..15: mol_type = other DNA
tgtggtgggcagcta

SEQ ID NO: 16729 - DNA, 15 bp, synthetic construct
  source 1..15: mol_type = other DNA
acagtgccatccatc

SEQ ID NO: 16730 - DNA, 15 bp, synthetic construct
  source 1..15: mol_type = other DNA
ggatgagtgcgccat

SEQ ID NO: 16731 - DNA, 15 bp, synthetic construct
  source 1..15: mol_type = other DNA
cgcagctgctgttgg

SEQ ID NO: 16732 - DNA, 15 bp, synthetic construct
  source 1..15: mol_type = other DNA
tccctggagaatgag

SEQ ID NO: 16733 - DNA, 15 bp, synthetic construct
  source 1..15: mol_type = other DNA
tatactttggtagga

SEQ ID NO: 16734 - DNA, 15 bp, synthetic construct
  source 1..15: mol_type = other DNA
gtgcacatcctattg

SEQ ID NO: 16735 - DNA, 15 bp, synthetic construct
  source 1..15: mol_type = other DNA
gaagacaatgcaagt

SEQ ID NO: 16736 - DNA, 15 bp, synthetic construct
  source 1..15: mol_type = other DNA
agacctgaagtagcg

SEQ ID NO: 16737 - DNA, 15 bp, synthetic construct
  source 1..15: mol_type = other DNA
ggaggtctctaaggg

SEQ ID NO: 16738 - DNA, 15 bp, synthetic construct
  source 1..15: mol_type = other DNA
cgcatcagctcttta

SEQ ID NO: 16739 - DNA, 15 bp, synthetic construct
  source 1..15: mol_type = other DNA
tcaaagccaaaatca

SEQ ID NO: 16740 - DNA, 15 bp, synthetic construct
  source 1..15: mol_type = other DNA
agtggactttgatgg

SEQ ID NO: 16741 - DNA, 15 bp, synthetic construct
  source 1..15: mol_type = other DNA
ccttctatactgtct

SEQ ID NO: 16742 - DNA, 15 bp, synthetic construct
  source 1..15: mol_type = other DNA
atttgtaggctggaa

SEQ ID NO: 16743 - DNA, 15 bp, synthetic construct
  source 1..15: mol_type = other DNA
tgttgatggaaaaca

SEQ ID NO: 16744 - DNA, 15 bp, synthetic construct
  source 1..15: mol_type = other DNA
atctaggctgctttc

SEQ ID NO: 16745 - DNA, 15 bp, synthetic construct
  source 1..15: mol_type = other DNA
ctgacttggaacagg

SEQ ID NO: 16746 - DNA, 15 bp, synthetic construct
  source 1..15: mol_type = other DNA
ttgcttggactcgat

SEQ ID NO: 16747 - DNA, 15 bp, synthetic construct
  source 1..15: mol_type = other DNA
gatgagaagggcaag

SEQ ID NO: 16748 - DNA, 15 bp, synthetic construct
  source 1..15: mol_type = other DNA
gaatgagaaggtgaa

SEQ ID NO: 16749 - DNA, 15 bp, synthetic construct
  source 1..15: mol_type = other DNA
cactcattcttatgg

SEQ ID NO: 16750 - DNA, 15 bp, synthetic construct
  source 1..15: mol_type = other DNA
cactccatcaaagaa

SEQ ID NO: 16751 - DNA, 15 bp, synthetic construct
  source 1..15: mol_type = other DNA
agaaaatcaacatga

SEQ ID NO: 16752 - DNA, 15 bp, synthetic construct
  source 1..15: mol_type = other DNA
cactcactgactcta

SEQ ID NO: 16753 - DNA, 15 bp, synthetic construct
  source 1..15: mol_type = other DNA
acatctctcacacat

SEQ ID NO: 16754 - DNA, 15 bp, synthetic construct
  source 1..15: mol_type = other DNA
gagggcctcaagatc

SEQ ID NO: 16755 - DNA, 15 bp, synthetic construct
  source 1..15: mol_type = other DNA
ctagccttggatcac

SEQ ID NO: 16756 - DNA, 15 bp, synthetic construct
  source 1..15: mol_type = other DNA
ctctccaagcctatg

SEQ ID NO: 16757 - DNA, 15 bp, synthetic construct
  source 1..15: mol_type = other DNA
tgatttcagtgtcta

SEQ ID NO: 16758 - DNA, 15 bp, synthetic construct
  source 1..15: mol_type = other DNA
ctgattggcacgtca

SEQ ID NO: 16759 - DNA, 15 bp, synthetic construct
  source 1..15: mol_type = other DNA
cttcaagctgagtga

SEQ ID NO: 16760 - DNA, 15 bp, synthetic construct
  source 1..15: mol_type = other DNA
ttgaggtctctggat

SEQ ID NO: 16761 - DNA, 15 bp, synthetic construct
  source 1..15: mol_type = other DNA
atgaatggcattcct

SEQ ID NO: 16762 - DNA, 15 bp, synthetic construct
  source 1..15: mol_type = other DNA
atgaatggcattcct

SEQ ID NO: 16763 - DNA, 15 bp, synthetic construct
  source 1..15: mol_type = other DNA
ccctcacgcaaaagg

SEQ ID NO: 16764 - DNA, 15 bp, synthetic construct
  source 1..15: mol_type = other DNA
ggctcgatgcagttg

SEQ ID NO: 16765 - DNA, 15 bp, synthetic construct
  source 1..15: mol_type = other DNA
tccctcagtgtattg

SEQ ID NO: 16766 - DNA, 15 bp, synthetic construct
  source 1..15: mol_type = other DNA
aacttacctccgaaa

SEQ ID NO: 16767 - DNA, 15 bp, synthetic construct
  source 1..15: mol_type = other DNA
tccctcagtgtattg

SEQ ID NO: 16768 - DNA, 15 bp, synthetic construct
  source 1..15: mol_type = other DNA
aacttacctccgaaa

SEQ ID NO: 16769 - DNA, 15 bp, synthetic construct
  source 1..15: mol_type = other DNA
gctttaaagagtgga

SEQ ID NO: 16770 - DNA, 15 bp, synthetic construct
  source 1..15: mol_type = other DNA
cacaaggtaattctt

SEQ ID NO: 16771 - DNA, 15 bp, synthetic construct
  source 1..15: mol_type = other DNA
accttgtggaggctg

SEQ ID NO: 16772 - DNA, 15 bp, synthetic construct
  source 1..15: mol_type = other DNA
tggccatacacatac

SEQ ID NO: 16773 - DNA, 15 bp, synthetic construct
  source 1..15: mol_type = other DNA
ccccaaggagctcag

SEQ ID NO: 16774 - DNA, 15 bp, synthetic construct
  source 1..15: mol_type = other DNA
gctcacatttgtagg

SEQ ID NO: 16775 - DNA, 15 bp, synthetic construct
  source 1..15: mol_type = other DNA
taagaggaaacagga

SEQ ID NO: 16776 - DNA, 15 bp, synthetic construct
  source 1..15: mol_type = other DNA
tcaatgaagaagacc

SEQ ID NO: 16777 - DNA, 15 bp, synthetic construct
  source 1..15: mol_type = other DNA
tgcgtcatcgagatc

SEQ ID NO: 16778 - DNA, 15 bp, synthetic construct
  source 1..15: mol_type = other DNA
ggtattgtatttggg

SEQ ID NO: 16779 - DNA, 15 bp, synthetic construct
  source 1..15: mol_type = other DNA
cagccctggatatag

SEQ ID NO: 16780 - DNA, 15 bp, synthetic construct
  source 1..15: mol_type = other DNA
cctgactagatctgt

SEQ ID NO: 16781 - DNA, 15 bp, synthetic construct
  source 1..15: mol_type = other DNA
gatgacagatagcca

SEQ ID NO: 16782 - DNA, 15 bp, synthetic construct
  source 1..15: mol_type = other DNA
cttgtacgtgtagcc

SEQ ID NO: 16783 - DNA, 15 bp, synthetic construct
  source 1..15: mol_type = other DNA
cgtgaagaagtacct

SEQ ID NO: 16784 - DNA, 15 bp, synthetic construct
  source 1..15: mol_type = other DNA
tgaagcctacggaga

SEQ ID NO: 16785 - DNA, 15 bp, synthetic construct
  source 1..15: mol_type = other DNA
acctacttgagctgg

SEQ ID NO: 16786 - DNA, 15 bp, synthetic construct
  source 1..15: mol_type = other DNA
ataaagggagaaagg

SEQ ID NO: 16787 - DNA, 15 bp, synthetic construct
  source 1..15: mol_type = other DNA
gctctgctttacaga

SEQ ID NO: 16788 - DNA, 15 bp, synthetic construct
  source 1..15: mol_type = other DNA
gtctccaaagagatc

SEQ ID NO: 16789 - DNA, 15 bp, synthetic construct
  source 1..15: mol_type = other DNA
cttattgatgaacgg

SEQ ID NO: 16790 - DNA, 15 bp, synthetic construct
  source 1..15: mol_type = other DNA
ctcaaattactacag

SEQ ID NO: 16791 - DNA, 15 bp, synthetic construct
  source 1..15: mol_type = other DNA
gtatgaggcagtagc

SEQ ID NO: 16792 - DNA, 15 bp, synthetic construct
  source 1..15: mol_type = other DNA
taccactctgtcaat

SEQ ID NO: 16793 - DNA, 15 bp, synthetic construct
  source 1..15: mol_type = other DNA
accttccggaacttc

SEQ ID NO: 16794 - DNA, 15 bp, synthetic construct
  source 1..15: mol_type = other DNA
tgccactgtctctcg

SEQ ID NO: 16795 - DNA, 15 bp, synthetic construct
  source 1..15: mol_type = other DNA
ggaaatgaaaggtgg

SEQ ID NO: 16796 - DNA, 15 bp, synthetic construct
  source 1..15: mol_type = other DNA
tttcagtcccacatt

SEQ ID NO: 16797 - DNA, 15 bp, synthetic construct
  source 1..15: mol_type = other DNA
aggactgagtttttg

SEQ ID NO: 16798 - DNA, 15 bp, synthetic construct
  source 1..15: mol_type = other DNA
ctctgctcgtgaagc

SEQ ID NO: 16799 - DNA, 15 bp, synthetic construct
  source 1..15: mol_type = other DNA
tcctggacataggcc

SEQ ID NO: 16800 - DNA, 15 bp, synthetic construct
  source 1..15: mol_type = other DNA
acgagtaccccgatg

SEQ ID NO: 16801 - DNA, 15 bp, synthetic construct
  source 1..15: mol_type = other DNA
tcatcagagatgagg

SEQ ID NO: 16802 - DNA, 15 bp, synthetic construct
  source 1..15: mol_type = other DNA
tcccctaaagcttgg

SEQ ID NO: 16803 - DNA, 15 bp, synthetic construct
  source 1..15: mol_type = other DNA
atgcttgatagaagg

SEQ ID NO: 16804 - DNA, 15 bp, synthetic construct
  source 1..15: mol_type = other DNA
gatggagtaggtcgt

SEQ ID NO: 16805 - DNA, 15 bp, synthetic construct
  source 1..15: mol_type = other DNA
gtccaaaacttctac

SEQ ID NO: 16806 - DNA, 15 bp, synthetic construct
  source 1..15: mol_type = other DNA
agtggccaaccctag

SEQ ID NO: 16807 - DNA, 15 bp, synthetic construct
  source 1..15: mol_type = other DNA
acctcccttaacttg

SEQ ID NO: 16808 - DNA, 15 bp, synthetic construct
  source 1..15: mol_type = other DNA
ggttgttgcagtatt

SEQ ID NO: 16809 - DNA, 15 bp, synthetic construct
  source 1..15: mol_type = other DNA
cacatgatccgtaac

SEQ ID NO: 16810 - DNA, 15 bp, synthetic construct
  source 1..15: mol_type = other DNA
ggagggacctcagac

SEQ ID NO: 16811 - DNA, 15 bp, synthetic construct
  source 1..15: mol_type = other DNA
aagcccccttaaacc

SEQ ID NO: 16812 - DNA, 15 bp, synthetic construct
  source 1..15: mol_type = other DNA
gtcatcttgtactgg

SEQ ID NO: 16813 - DNA, 15 bp, synthetic construct
  source 1..15: mol_type = other DNA
aagcccccttaaacc

SEQ ID NO: 16814 - DNA, 15 bp, synthetic construct
  source 1..15: mol_type = other DNA
gtcatcttgtactgg

SEQ ID NO: 16815 - DNA, 15 bp, synthetic construct
  source 1..15: mol_type = other DNA
cctgcaagtgagtgc

SEQ ID NO: 16816 - DNA, 15 bp, synthetic construct
  source 1..15: mol_type = other DNA
caaatttccaaatag

SEQ ID NO: 16817 - DNA, 15 bp, synthetic construct
  source 1..15: mol_type = other DNA
tcatccaaattgtga

SEQ ID NO: 16818 - DNA, 15 bp, synthetic construct
  source 1..15: mol_type = other DNA
atattggtgctttgg

SEQ ID NO: 16819 - DNA, 15 bp, synthetic construct
  source 1..15: mol_type = other DNA
atattggtgctttgg

SEQ ID NO: 16820 - DNA, 15 bp, synthetic construct
  source 1..15: mol_type = other DNA
tagcaggtggtagac

SEQ ID NO: 16821 - DNA, 15 bp, synthetic construct
  source 1..15: mol_type = other DNA
agtcccggcccttct

SEQ ID NO: 16822 - DNA, 15 bp, synthetic construct
  source 1..15: mol_type = other DNA
ggactgtcttaggga

SEQ ID NO: 16823 - DNA, 15 bp, synthetic construct
  source 1..15: mol_type = other DNA
aagacagtcccaagt

SEQ ID NO: 16824 - DNA, 15 bp, synthetic construct
  source 1..15: mol_type = other DNA
tggtgatccacacaa

SEQ ID NO: 16825 - DNA, 15 bp, synthetic construct
  source 1..15: mol_type = other DNA
cctcatcgagtttgg

SEQ ID NO: 16826 - DNA, 15 bp, synthetic construct
  source 1..15: mol_type = other DNA
agggagtcatagttg

SEQ ID NO: 16827 - DNA, 15 bp, synthetic construct
  source 1..15: mol_type = other DNA
gccaagagcctacgg

SEQ ID NO: 16828 - DNA, 15 bp, synthetic construct
  source 1..15: mol_type = other DNA
gttagatggcatcac

SEQ ID NO: 16829 - DNA, 15 bp, synthetic construct
  source 1..15: mol_type = other DNA
gacgtcatcgagtct

SEQ ID NO: 16830 - DNA, 15 bp, synthetic construct
  source 1..15: mol_type = other DNA
aatttattcctgcat

SEQ ID NO: 16831 - DNA, 15 bp, synthetic construct
  source 1..15: mol_type = other DNA
agagctttggagacc

SEQ ID NO: 16832 - DNA, 15 bp, synthetic construct
  source 1..15: mol_type = other DNA
aaggccctagatgtg

SEQ ID NO: 16833 - DNA, 15 bp, synthetic construct
  source 1..15: mol_type = other DNA
cggccaagtctgaac

SEQ ID NO: 16834 - DNA, 15 bp, synthetic construct
  source 1..15: mol_type = other DNA
tatgccggagatgag

SEQ ID NO: 16835 - DNA, 15 bp, synthetic construct
  source 1..15: mol_type = other DNA
gatgtctttaagggc

SEQ ID NO: 16836 - DNA, 15 bp, synthetic construct
  source 1..15: mol_type = other DNA
aatcttggtgatcca

SEQ ID NO: 16837 - DNA, 15 bp, synthetic construct
  source 1..15: mol_type = other DNA
tgatttccaagaagc

SEQ ID NO: 16838 - DNA, 15 bp, synthetic construct
  source 1..15: mol_type = other DNA
cagtgacatggaatc

SEQ ID NO: 16839 - DNA, 15 bp, synthetic construct
  source 1..15: mol_type = other DNA
tattccgtcattatg

SEQ ID NO: 16840 - DNA, 15 bp, synthetic construct
  source 1..15: mol_type = other DNA
gcggtagagattgac

SEQ ID NO: 16841 - DNA, 15 bp, synthetic construct
  source 1..15: mol_type = other DNA
ccaggcttgtcttaa

SEQ ID NO: 16842 - DNA, 15 bp, synthetic construct
  source 1..15: mol_type = other DNA
agggatccctctggg

SEQ ID NO: 16843 - DNA, 15 bp, synthetic construct
  source 1..15: mol_type = other DNA
cttgatatgacctga

SEQ ID NO: 16844 - DNA, 15 bp, synthetic construct
  source 1..15: mol_type = other DNA
tgcagcaatgactag

SEQ ID NO: 16845 - DNA, 15 bp, synthetic construct
  source 1..15: mol_type = other DNA
gattgacaatcctgc

SEQ ID NO: 16846 - DNA, 15 bp, synthetic construct
  source 1..15: mol_type = other DNA
ccttcaaagatccaa

SEQ ID NO: 16847 - DNA, 15 bp, synthetic construct
  source 1..15: mol_type = other DNA
ctgaggaatgtgttg

SEQ ID NO: 16848 - DNA, 15 bp, synthetic construct
  source 1..15: mol_type = other DNA
tgctggcgaagagag

SEQ ID NO: 16849 - DNA, 15 bp, synthetic construct
  source 1..15: mol_type = other DNA
ctgaggaatgtgttg

SEQ ID NO: 16850 - DNA, 15 bp, synthetic construct
  source 1..15: mol_type = other DNA
tgctggcgaagagag

SEQ ID NO: 16851 - DNA, 15 bp, synthetic construct
  source 1..15: mol_type = other DNA
tgtgcagaaccaaca

SEQ ID NO: 16852 - DNA, 15 bp, synthetic construct
  source 1..15: mol_type = other DNA
gggcctcacattcca

SEQ ID NO: 16853 - DNA, 15 bp, synthetic construct
  source 1..15: mol_type = other DNA
tgtgcagaaccaaca

SEQ ID NO: 16854 - DNA, 15 bp, synthetic construct
  source 1..15: mol_type = other DNA
gggcctcacattcca

SEQ ID NO: 16855 - DNA, 15 bp, synthetic construct
  source 1..15: mol_type = other DNA
ttgctggattcgagt

SEQ ID NO: 16856 - DNA, 15 bp, synthetic construct
  source 1..15: mol_type = other DNA
tggctagatgtatga

SEQ ID NO: 16857 - DNA, 15 bp, synthetic construct
  source 1..15: mol_type = other DNA
cgaagaggtcagatc

SEQ ID NO: 16858 - DNA, 15 bp, synthetic construct
  source 1..15: mol_type = other DNA
tgtacaggaaaaggg

SEQ ID NO: 16859 - DNA, 15 bp, synthetic construct
  source 1..15: mol_type = other DNA
cgatgccacagtacc

SEQ ID NO: 16860 - DNA, 15 bp, synthetic construct
  source 1..15: mol_type = other DNA
taaccctcgcagtgg

SEQ ID NO: 16861 - DNA, 15 bp, synthetic construct
  source 1..15: mol_type = other DNA
ctgcgagggttatga

SEQ ID NO: 16862 - DNA, 15 bp, synthetic construct
  source 1..15: mol_type = other DNA
gaggcatagatgttc

SEQ ID NO: 16863 - DNA, 15 bp, synthetic construct
  source 1..15: mol_type = other DNA
tccggagctgtattc

SEQ ID NO: 16864 - DNA, 15 bp, synthetic construct
  source 1..15: mol_type = other DNA
ccaaagatttagttc

SEQ ID NO: 16865 - DNA, 15 bp, synthetic construct
  source 1..15: mol_type = other DNA
ggctatcgttttgaa

SEQ ID NO: 16866 - DNA, 15 bp, synthetic construct
  source 1..15: mol_type = other DNA
cgtaacccatgagga

SEQ ID NO: 16867 - DNA, 15 bp, synthetic construct
  source 1..15: mol_type = other DNA
acacggacacggtac

SEQ ID NO: 16868 - DNA, 15 bp, synthetic construct
  source 1..15: mol_type = other DNA
tcgaagagacccgaa

SEQ ID NO: 16869 - DNA, 15 bp, synthetic construct
  source 1..15: mol_type = other DNA
acacggacacggtac

SEQ ID NO: 16870 - DNA, 15 bp, synthetic construct
  source 1..15: mol_type = other DNA
tcgaagagacccgaa

SEQ ID NO: 16871 - DNA, 15 bp, synthetic construct
  source 1..15: mol_type = other DNA
agggtcccctgacgg

SEQ ID NO: 16872 - DNA, 15 bp, synthetic construct
  source 1..15: mol_type = other DNA
cccgagacgattgtg

SEQ ID NO: 16873 - DNA, 15 bp, synthetic construct
  source 1..15: mol_type = other DNA
cagcttctgctatcg

SEQ ID NO: 16874 - DNA, 15 bp, synthetic construct
  source 1..15: mol_type = other DNA
gcgccttagaccgtt

SEQ ID NO: 16875 - DNA, 15 bp, synthetic construct
  source 1..15: mol_type = other DNA
ctccaagcgtgcagc

SEQ ID NO: 16876 - DNA, 15 bp, synthetic construct
  source 1..15: mol_type = other DNA
acctgggtacagaat

SEQ ID NO: 16877 - DNA, 15 bp, synthetic construct
  source 1..15: mol_type = other DNA
tgtgggtacctgaag

SEQ ID NO: 16878 - DNA, 15 bp, synthetic construct
  source 1..15: mol_type = other DNA
atcctagcagaggag

SEQ ID NO: 16879 - DNA, 15 bp, synthetic construct
  source 1..15: mol_type = other DNA
caccctcctaagact

SEQ ID NO: 16880 - DNA, 15 bp, synthetic construct
  source 1..15: mol_type = other DNA
accgttgggcatgag

SEQ ID NO: 16881 - DNA, 15 bp, synthetic construct
  source 1..15: mol_type = other DNA
ctgctccaacatcgc

SEQ ID NO: 16882 - DNA, 15 bp, synthetic construct
  source 1..15: mol_type = other DNA
gaagagcgtgctgct

SEQ ID NO: 16883 - DNA, 15 bp, synthetic construct
  source 1..15: mol_type = other DNA
ctgctccaacatcgc

SEQ ID NO: 16884 - DNA, 15 bp, synthetic construct
  source 1..15: mol_type = other DNA
gaagagcgtgctgct

SEQ ID NO: 16885 - DNA, 15 bp, synthetic construct
  source 1..15: mol_type = other DNA
ctgcgcggactcatg

SEQ ID NO: 16886 - DNA, 15 bp, synthetic construct
  source 1..15: mol_type = other DNA
ggccgtcggatcgaa

SEQ ID NO: 16887 - DNA, 15 bp, synthetic construct
  source 1..15: mol_type = other DNA
gtccgggttcgatcc

SEQ ID NO: 16888 - DNA, 15 bp, synthetic construct
  source 1..15: mol_type = other DNA
acctgctcattaacg

SEQ ID NO: 16889 - DNA, 15 bp, synthetic construct
  source 1..15: mol_type = other DNA
tccgccgtcttcgtg

SEQ ID NO: 16890 - DNA, 15 bp, synthetic construct
  source 1..15: mol_type = other DNA
aatggcgaagtagag

SEQ ID NO: 16891 - DNA, 15 bp, synthetic construct
  source 1..15: mol_type = other DNA
tccgccgtcttcgtg

SEQ ID NO: 16892 - DNA, 15 bp, synthetic construct
  source 1..15: mol_type = other DNA
aatggcgaagtagag

SEQ ID NO: 16893 - DNA, 15 bp, synthetic construct
  source 1..15: mol_type = other DNA
cgagttctccttcgg

SEQ ID NO: 16894 - DNA, 15 bp, synthetic construct
  source 1..15: mol_type = other DNA
tcagtcgagaaattc

SEQ ID NO: 16895 - DNA, 15 bp, synthetic construct
  source 1..15: mol_type = other DNA
tgcaagagactttag

SEQ ID NO: 16896 - DNA, 15 bp, synthetic construct
  source 1..15: mol_type = other DNA
agtttgcgggaactc

SEQ ID NO: 16897 - DNA, 15 bp, synthetic construct
  source 1..15: mol_type = other DNA
gttcccgcaaactaa

SEQ ID NO: 16898 - DNA, 15 bp, synthetic construct
  source 1..15: mol_type = other DNA
atagaagccccagag

SEQ ID NO: 16899 - DNA, 15 bp, synthetic construct
  source 1..15: mol_type = other DNA
gttttgtggaatgag

SEQ ID NO: 16900 - DNA, 15 bp, synthetic construct
  source 1..15: mol_type = other DNA
ttatggtgtccaacg

SEQ ID NO: 16901 - DNA, 15 bp, synthetic construct
  source 1..15: mol_type = other DNA
tgacactttgattgg

SEQ ID NO: 16902 - DNA, 15 bp, synthetic construct
  source 1..15: mol_type = other DNA
ttgttgcattttgtt

SEQ ID NO: 16903 - DNA, 15 bp, synthetic construct
  source 1..15: mol_type = other DNA
ttggttcttttgaga

SEQ ID NO: 16904 - DNA, 15 bp, synthetic construct
  source 1..15: mol_type = other DNA
gacaagatctacgac

SEQ ID NO: 16905 - DNA, 15 bp, synthetic construct
  source 1..15: mol_type = other DNA
gaagaacttctgagg

SEQ ID NO: 16906 - DNA, 15 bp, synthetic construct
  source 1..15: mol_type = other DNA
tctagtatgtgctaa

SEQ ID NO: 16907 - DNA, 15 bp, synthetic construct
  source 1..15: mol_type = other DNA
atccctcagggtatc

SEQ ID NO: 16908 - DNA, 15 bp, synthetic construct
  source 1..15: mol_type = other DNA
ccagatgttcgactc

SEQ ID NO: 16909 - DNA, 15 bp, synthetic construct
  source 1..15: mol_type = other DNA
tacctgtgaaacaca

SEQ ID NO: 16910 - DNA, 15 bp, synthetic construct
  source 1..15: mol_type = other DNA
ctggtcacgggtttt

SEQ ID NO: 16911 - DNA, 15 bp, synthetic construct
  source 1..15: mol_type = other DNA
gatgattggaaccgc

SEQ ID NO: 16912 - DNA, 15 bp, synthetic construct
  source 1..15: mol_type = other DNA
ttctggaaagtcttg

SEQ ID NO: 16913 - DNA, 15 bp, synthetic construct
  source 1..15: mol_type = other DNA
tctacagcacagcag

SEQ ID NO: 16914 - DNA, 15 bp, synthetic construct
  source 1..15: mol_type = other DNA
agtgtcaagtttgag

SEQ ID NO: 16915 - DNA, 15 bp, synthetic construct
  source 1..15: mol_type = other DNA
tctccaggtcttcgg

SEQ ID NO: 16916 - DNA, 15 bp, synthetic construct
  source 1..15: mol_type = other DNA
gaagctctacaagtg

SEQ ID NO: 16917 - DNA, 15 bp, synthetic construct
  source 1..15: mol_type = other DNA
tgacgtcaagcttca

SEQ ID NO: 16918 - DNA, 15 bp, synthetic construct
  source 1..15: mol_type = other DNA
tgagcactgccagat

SEQ ID NO: 16919 - DNA, 15 bp, synthetic construct
  source 1..15: mol_type = other DNA
ttgagctcaagcgtg

SEQ ID NO: 16920 - DNA, 15 bp, synthetic construct
  source 1..15: mol_type = other DNA
acatgtgtcccatct

SEQ ID NO: 16921 - DNA, 15 bp, synthetic construct
  source 1..15: mol_type = other DNA
ttcggtgagcgtcag

SEQ ID NO: 16922 - DNA, 15 bp, synthetic construct
  source 1..15: mol_type = other DNA
aggctgagtttatca

SEQ ID NO: 16923 - DNA, 15 bp, synthetic construct
  source 1..15: mol_type = other DNA
tctccgagaagaaag

SEQ ID NO: 16924 - DNA, 15 bp, synthetic construct
  source 1..15: mol_type = other DNA
accctgaggcaccta

SEQ ID NO: 16925 - DNA, 15 bp, synthetic construct
  source 1..15: mol_type = other DNA
cagccgtacatgggc

SEQ ID NO: 16926 - DNA, 15 bp, synthetic construct
  source 1..15: mol_type = other DNA
agtataactgtaagt

SEQ ID NO: 16927 - DNA, 15 bp, synthetic construct
  source 1..15: mol_type = other DNA
cacagtgcttctccc

SEQ ID NO: 16928 - DNA, 15 bp, synthetic construct
  source 1..15: mol_type = other DNA
gaagaagatgtaccg

SEQ ID NO: 16929 - DNA, 15 bp, synthetic construct
  source 1..15: mol_type = other DNA
agaagatgcacttgt

SEQ ID NO: 16930 - DNA, 15 bp, synthetic construct
  source 1..15: mol_type = other DNA
gcaattttcctcggt

SEQ ID NO: 16931 - DNA, 15 bp, synthetic construct
  source 1..15: mol_type = other DNA
acaaaggtgtgcatg

SEQ ID NO: 16932 - DNA, 15 bp, synthetic construct
  source 1..15: mol_type = other DNA
cttgcaatcaatgcg

SEQ ID NO: 16933 - DNA, 15 bp, synthetic construct
  source 1..15: mol_type = other DNA
agctctcaaagttgg

SEQ ID NO: 16934 - DNA, 15 bp, synthetic construct
  source 1..15: mol_type = other DNA
ctccatcctgaaact

SEQ ID NO: 16935 - DNA, 15 bp, synthetic construct
  source 1..15: mol_type = other DNA
tcttgtggttctcct

SEQ ID NO: 16936 - DNA, 15 bp, synthetic construct
  source 1..15: mol_type = other DNA
ctctgacggtaataa

SEQ ID NO: 16937 - DNA, 15 bp, synthetic construct
  source 1..15: mol_type = other DNA
actcagtaaggaaac

SEQ ID NO: 16938 - DNA, 15 bp, synthetic construct
  source 1..15: mol_type = other DNA
tcaacgagcacgttc

SEQ ID NO: 16939 - DNA, 15 bp, synthetic construct
  source 1..15: mol_type = other DNA
gtaggcatggttctt

SEQ ID NO: 16940 - DNA, 15 bp, synthetic construct
  source 1..15: mol_type = other DNA
agatgcgggatgacg

SEQ ID NO: 16941 - DNA, 15 bp, synthetic construct
  source 1..15: mol_type = other DNA
gcttggaacaatagg

SEQ ID NO: 16942 - DNA, 15 bp, synthetic construct
  source 1..15: mol_type = other DNA
agtggaaggtgtcta

SEQ ID NO: 16943 - DNA, 15 bp, synthetic construct
  source 1..15: mol_type = other DNA
ggttgctggagtcgg

SEQ ID NO: 16944 - DNA, 15 bp, synthetic construct
  source 1..15: mol_type = other DNA
cgactactgcgagga

SEQ ID NO: 16945 - DNA, 15 bp, synthetic construct
  source 1..15: mol_type = other DNA
tctcgtcgacgaaga

SEQ ID NO: 16946 - DNA, 15 bp, synthetic construct
  source 1..15: mol_type = other DNA
ggccaagtcggagaa

SEQ ID NO: 16947 - DNA, 15 bp, synthetic construct
  source 1..15: mol_type = other DNA
gaagtcgtccttctt

SEQ ID NO: 16948 - DNA, 15 bp, synthetic construct
  source 1..15: mol_type = other DNA
ggcgacaagaagtat

SEQ ID NO: 16949 - DNA, 15 bp, synthetic construct
  source 1..15: mol_type = other DNA
tggatcttgaggtgg

SEQ ID NO: 16950 - DNA, 15 bp, synthetic construct
  source 1..15: mol_type = other DNA
catccgcttgagcta

SEQ ID NO: 16951 - DNA, 15 bp, synthetic construct
  source 1..15: mol_type = other DNA
acggcagcttgtcgc

SEQ ID NO: 16952 - DNA, 15 bp, synthetic construct
  source 1..15: mol_type = other DNA
attgcctctaatatc

SEQ ID NO: 16953 - DNA, 15 bp, synthetic construct
  source 1..15: mol_type = other DNA
acaccacaataaaat

SEQ ID NO: 16954 - DNA, 15 bp, synthetic construct
  source 1..15: mol_type = other DNA
gaaatgaggatgatg

SEQ ID NO: 16955 - DNA, 15 bp, synthetic construct
  source 1..15: mol_type = other DNA
gcaggtgtaaattga

SEQ ID NO: 16956 - DNA, 15 bp, synthetic construct
  source 1..15: mol_type = other DNA
tcaaggataatggac

SEQ ID NO: 16957 - DNA, 15 bp, synthetic construct
  source 1..15: mol_type = other DNA
tcgtgttgcatgggg

SEQ ID NO: 16958 - DNA, 15 bp, synthetic construct
  source 1..15: mol_type = other DNA
tgtacagccttcaaa

SEQ ID NO: 16959 - DNA, 15 bp, synthetic construct
  source 1..15: mol_type = other DNA
tttttaaatccaagt

SEQ ID NO: 16960 - DNA, 15 bp, synthetic construct
  source 1..15: mol_type = other DNA
ggagaaggatggatt

SEQ ID NO: 16961 - DNA, 15 bp, synthetic construct
  source 1..15: mol_type = other DNA
atgaatgctatgtct

SEQ ID NO: 16962 - DNA, 15 bp, synthetic construct
  source 1..15: mol_type = other DNA
gtcattcagaacggt

SEQ ID NO: 16963 - DNA, 15 bp, synthetic construct
  source 1..15: mol_type = other DNA
cgtcagcccactaac

SEQ ID NO: 16964 - DNA, 15 bp, synthetic construct
  source 1..15: mol_type = other DNA
cccatgacatttcta

SEQ ID NO: 16965 - DNA, 15 bp, synthetic construct
  source 1..15: mol_type = other DNA
tctgggaacttgacg

SEQ ID NO: 16966 - DNA, 15 bp, synthetic construct
  source 1..15: mol_type = other DNA
aatagacatttaggc

SEQ ID NO: 16967 - DNA, 15 bp, synthetic construct
  source 1..15: mol_type = other DNA
tctctccctgaatat

SEQ ID NO: 16968 - DNA, 15 bp, synthetic construct
  source 1..15: mol_type = other DNA
ctcctcatcgagtgc

SEQ ID NO: 16969 - DNA, 15 bp, synthetic construct
  source 1..15: mol_type = other DNA
tagtgcaagcaaagg

SEQ ID NO: 16970 - DNA, 15 bp, synthetic construct
  source 1..15: mol_type = other DNA
tcatctctcatcaag

SEQ ID NO: 16971 - DNA, 15 bp, synthetic construct
  source 1..15: mol_type = other DNA
tcctgaggagaaaca

SEQ ID NO: 16972 - DNA, 15 bp, synthetic construct
  source 1..15: mol_type = other DNA
attcactatagaagt

SEQ ID NO: 16973 - DNA, 15 bp, synthetic construct
  source 1..15: mol_type = other DNA
ctgtgcaaataaatg

SEQ ID NO: 16974 - DNA, 15 bp, synthetic construct
  source 1..15: mol_type = other DNA
ccaatggtttgtctc

SEQ ID NO: 16975 - DNA, 15 bp, synthetic construct
  source 1..15: mol_type = other DNA
ttttctctgcgtgac

SEQ ID NO: 16976 - DNA, 15 bp, synthetic construct
  source 1..15: mol_type = other DNA
tcctcagtgggtggt

SEQ ID NO: 16977 - DNA, 15 bp, synthetic construct
  source 1..15: mol_type = other DNA
tttctcctcaatgct

SEQ ID NO: 16978 - DNA, 15 bp, synthetic construct
  source 1..15: mol_type = other DNA
gaagatgatcaatgc

SEQ ID NO: 16979 - DNA, 15 bp, synthetic construct
  source 1..15: mol_type = other DNA
ggtcaggacatcccc

SEQ ID NO: 16980 - DNA, 15 bp, synthetic construct
  source 1..15: mol_type = other DNA
aaaattttgatgacc

SEQ ID NO: 16981 - DNA, 15 bp, synthetic construct
  source 1..15: mol_type = other DNA
ttccatgttttcatc

SEQ ID NO: 16982 - DNA, 15 bp, synthetic construct
  source 1..15: mol_type = other DNA
tgtccatcgtgctat

SEQ ID NO: 16983 - DNA, 15 bp, synthetic construct
  source 1..15: mol_type = other DNA
tggactcagagtagc

SEQ ID NO: 16984 - DNA, 15 bp, synthetic construct
  source 1..15: mol_type = other DNA
tgcactacaggacac

SEQ ID NO: 16985 - DNA, 15 bp, synthetic construct
  source 1..15: mol_type = other DNA
ccctttcgtggtgaa

SEQ ID NO: 16986 - DNA, 15 bp, synthetic construct
  source 1..15: mol_type = other DNA
tttgttgccgctcat

SEQ ID NO: 16987 - DNA, 15 bp, synthetic construct
  source 1..15: mol_type = other DNA
caaaaggaaacttgg

SEQ ID NO: 16988 - DNA, 15 bp, synthetic construct
  source 1..15: mol_type = other DNA
gccacaagaaaccta

SEQ ID NO: 16989 - DNA, 15 bp, synthetic construct
  source 1..15: mol_type = other DNA
tgccactctcttcgc

SEQ ID NO: 16990 - DNA, 15 bp, synthetic construct
  source 1..15: mol_type = other DNA
tgaccacttcagtcg

SEQ ID NO: 16991 - DNA, 15 bp, synthetic construct
  source 1..15: mol_type = other DNA
gggtatgaggcttgg

SEQ ID NO: 16992 - DNA, 15 bp, synthetic construct
  source 1..15: mol_type = other DNA
cgggaacaggttctc

SEQ ID NO: 16993 - DNA, 15 bp, synthetic construct
  source 1..15: mol_type = other DNA
atatgagggtatttc

SEQ ID NO: 16994 - DNA, 15 bp, synthetic construct
  source 1..15: mol_type = other DNA
ctttgaagcgaaaag

SEQ ID NO: 16995 - DNA, 15 bp, synthetic construct
  source 1..15: mol_type = other DNA
aagaatgcctcatcg

SEQ ID NO: 16996 - DNA, 15 bp, synthetic construct
  source 1..15: mol_type = other DNA
aagtcctgcgtctaa

SEQ ID NO: 16997 - DNA, 15 bp, synthetic construct
  source 1..15: mol_type = other DNA
gagtttaaatcctct

SEQ ID NO: 16998 - DNA, 15 bp, synthetic construct
  source 1..15: mol_type = other DNA
tggcagcggcagtta

SEQ ID NO: 16999 - DNA, 15 bp, synthetic construct
  source 1..15: mol_type = other DNA
gccactttttcagag

SEQ ID NO: 17000 - DNA, 15 bp, synthetic construct
  source 1..15: mol_type = other DNA
cacgctaagttccca

SEQ ID NO: 17001 - DNA, 15 bp, synthetic construct
  source 1..15: mol_type = other DNA
actgctctgaggtag

SEQ ID NO: 17002 - DNA, 15 bp, synthetic construct
  source 1..15: mol_type = other DNA
accagctgcaattga

SEQ ID NO: 17003 - DNA, 15 bp, synthetic construct
  source 1..15: mol_type = other DNA
tatttggtgacgaat

SEQ ID NO: 17004 - DNA, 15 bp, synthetic construct
  source 1..15: mol_type = other DNA
gtacctcagcgatca

SEQ ID NO: 17005 - DNA, 15 bp, synthetic construct
  source 1..15: mol_type = other DNA
cgttgctgttgatta

SEQ ID NO: 17006 - DNA, 15 bp, synthetic construct
  source 1..15: mol_type = other DNA
gaacacaacggactt

SEQ ID NO: 17007 - DNA, 15 bp, synthetic construct
  source 1..15: mol_type = other DNA
tttgttagcaaccgg

SEQ ID NO: 17008 - DNA, 15 bp, synthetic construct
  source 1..15: mol_type = other DNA
cgagttctttgaatt

SEQ ID NO: 17009 - DNA, 15 bp, synthetic construct
  source 1..15: mol_type = other DNA
ttttcatttacgatt

SEQ ID NO: 17010 - DNA, 15 bp, synthetic construct
  source 1..15: mol_type = other DNA
cctgcacctttttga

SEQ ID NO: 17011 - DNA, 15 bp, synthetic construct
  source 1..15: mol_type = other DNA
ttgaaaattaaaaag

SEQ ID NO: 17012 - DNA, 15 bp, synthetic construct
  source 1..15: mol_type = other DNA
gtttgagccagcatg

SEQ ID NO: 17013 - DNA, 15 bp, synthetic construct
  source 1..15: mol_type = other DNA
gttgaggcttcgctt

SEQ ID NO: 17014 - DNA, 15 bp, synthetic construct
  source 1..15: mol_type = other DNA
ctctatgattaatcg

SEQ ID NO: 17015 - DNA, 15 bp, synthetic construct
  source 1..15: mol_type = other DNA
gcatttactgaggag

SEQ ID NO: 17016 - DNA, 15 bp, synthetic construct
  source 1..15: mol_type = other DNA
actgtttctgtctgc

SEQ ID NO: 17017 - DNA, 15 bp, synthetic construct
  source 1..15: mol_type = other DNA
gttcagcaattgttg

SEQ ID NO: 17018 - DNA, 15 bp, synthetic construct
  source 1..15: mol_type = other DNA
atttgggagttttgt

SEQ ID NO: 17019 - DNA, 15 bp, synthetic construct
  source 1..15: mol_type = other DNA
aaccatgtcctgcta

SEQ ID NO: 17020 - DNA, 15 bp, synthetic construct
  source 1..15: mol_type = other DNA
tgtctttaaaaacag

SEQ ID NO: 17021 - DNA, 15 bp, synthetic construct
  source 1..15: mol_type = other DNA
tatgtgaatattaga

SEQ ID NO: 17022 - DNA, 15 bp, synthetic construct
  source 1..15: mol_type = other DNA
tctcaagtaaccatg

SEQ ID NO: 17023 - DNA, 15 bp, synthetic construct
  source 1..15: mol_type = other DNA
atcgacactcaacaa

SEQ ID NO: 17024 - DNA, 15 bp, synthetic construct
  source 1..15: mol_type = other DNA
ttcaagaaaagaagc

SEQ ID NO: 17025 - DNA, 15 bp, synthetic construct
  source 1..15: mol_type = other DNA
gaggtcgggagtttg

SEQ ID NO: 17026 - DNA, 15 bp, synthetic construct
  source 1..15: mol_type = other DNA
ttaatcttaagattt

SEQ ID NO: 17027 - DNA, 15 bp, synthetic construct
  source 1..15: mol_type = other DNA
gtgaatgaaaggcag

SEQ ID NO: 17028 - DNA, 15 bp, synthetic construct
  source 1..15: mol_type = other DNA
ttatggtgtgtgctt

SEQ ID NO: 17029 - DNA, 15 bp, synthetic construct
  source 1..15: mol_type = other DNA
acaggtatcgtgaag

SEQ ID NO: 17030 - DNA, 15 bp, synthetic construct
  source 1..15: mol_type = other DNA
gagaaaatgcagcaa

SEQ ID NO: 17031 - DNA, 15 bp, synthetic construct
  source 1..15: mol_type = other DNA
cttcagatagtaaag

SEQ ID NO: 17032 - DNA, 15 bp, synthetic construct
  source 1..15: mol_type = other DNA
gtggttgttttctga

SEQ ID NO: 17033 - DNA, 15 bp, synthetic construct
  source 1..15: mol_type = other DNA
gctgttacccttgtc

SEQ ID NO: 17034 - DNA, 15 bp, synthetic construct
  source 1..15: mol_type = other DNA
ctcctcctgaagata

SEQ ID NO: 17035 - DNA, 15 bp, synthetic construct
  source 1..15: mol_type = other DNA
gcataccttgggaac

SEQ ID NO: 17036 - DNA, 15 bp, synthetic construct
  source 1..15: mol_type = other DNA
catttgctgccaatt

SEQ ID NO: 17037 - DNA, 15 bp, synthetic construct
  source 1..15: mol_type = other DNA
tttaatgggaaaaga

SEQ ID NO: 17038 - DNA, 15 bp, synthetic construct
  source 1..15: mol_type = other DNA
atactcagtctgaca

SEQ ID NO: 17039 - DNA, 15 bp, synthetic construct
  source 1..15: mol_type = other DNA
tgatgaccattagat

SEQ ID NO: 17040 - DNA, 15 bp, synthetic construct
  source 1..15: mol_type = other DNA
accttccaccaagtg

SEQ ID NO: 17041 - DNA, 15 bp, synthetic construct
  source 1..15: mol_type = other DNA
gaagtctttgaacaa

SEQ ID NO: 17042 - DNA, 15 bp, synthetic construct
  source 1..15: mol_type = other DNA
tctcttaaagtaggg

SEQ ID NO: 17043 - DNA, 15 bp, synthetic construct
  source 1..15: mol_type = other DNA
tagggtgattagtta

SEQ ID NO: 17044 - DNA, 15 bp, synthetic construct
  source 1..15: mol_type = other DNA
atttcccagtgccaa

SEQ ID NO: 17045 - DNA, 15 bp, synthetic construct
  source 1..15: mol_type = other DNA
atcatcaaaaacata

SEQ ID NO: 17046 - DNA, 15 bp, synthetic construct
  source 1..15: mol_type = other DNA
acagatggcaactta

SEQ ID NO: 17047 - DNA, 15 bp, synthetic construct
  source 1..15: mol_type = other DNA
ggatcattgctactg

SEQ ID NO: 17048 - DNA, 15 bp, synthetic construct
  source 1..15: mol_type = other DNA
catcttttaactgtg

SEQ ID NO: 17049 - DNA, 15 bp, synthetic construct
  source 1..15: mol_type = other DNA
ttaaagccaaatgag

SEQ ID NO: 17050 - DNA, 15 bp, synthetic construct
  source 1..15: mol_type = other DNA
atgtatttttactgc

SEQ ID NO: 17051 - DNA, 15 bp, synthetic construct
  source 1..15: mol_type = other DNA
aagaatgttgtcctt

SEQ ID NO: 17052 - DNA, 15 bp, synthetic construct
  source 1..15: mol_type = other DNA
tatcacccttgaggt

SEQ ID NO: 17053 - DNA, 15 bp, synthetic construct
  source 1..15: mol_type = other DNA
ttgacatgctgcaat

SEQ ID NO: 17054 - DNA, 15 bp, synthetic construct
  source 1..15: mol_type = other DNA
gaagttttacaggca

SEQ ID NO: 17055 - DNA, 15 bp, synthetic construct
  source 1..15: mol_type = other DNA
aagtgacaggctctt

SEQ ID NO: 17056 - DNA, 15 bp, synthetic construct
  source 1..15: mol_type = other DNA
cattttctcatgtca

SEQ ID NO: 17057 - DNA, 15 bp, synthetic construct
  source 1..15: mol_type = other DNA
ctgtggaccaaaaaa

SEQ ID NO: 17058 - DNA, 15 bp, synthetic construct
  source 1..15: mol_type = other DNA
actatttccaggatc

SEQ ID NO: 17059 - DNA, 15 bp, synthetic construct
  source 1..15: mol_type = other DNA
ccatttagtgtatta

SEQ ID NO: 17060 - DNA, 15 bp, synthetic construct
  source 1..15: mol_type = other DNA
tttttgtttcagtca

SEQ ID NO: 17061 - DNA, 15 bp, synthetic construct
  source 1..15: mol_type = other DNA
gataagggtcatcat

SEQ ID NO: 17062 - DNA, 15 bp, synthetic construct
  source 1..15: mol_type = other DNA
gtagacttagtttgt

SEQ ID NO: 17063 - DNA, 15 bp, synthetic construct
  source 1..15: mol_type = other DNA
caaaatgtccctatg

SEQ ID NO: 17064 - DNA, 15 bp, synthetic construct
  source 1..15: mol_type = other DNA
agagaatagagaact

SEQ ID NO: 17065 - DNA, 15 bp, synthetic construct
  source 1..15: mol_type = other DNA
gttgcttttgttcca

SEQ ID NO: 17066 - DNA, 15 bp, synthetic construct
  source 1..15: mol_type = other DNA
cattcccctgctgtc

SEQ ID NO: 17067 - DNA, 15 bp, synthetic construct
  source 1..15: mol_type = other DNA
aagctgatttccaag

SEQ ID NO: 17068 - DNA, 15 bp, synthetic construct
  source 1..15: mol_type = other DNA
aagctgatttccaag

SEQ ID NO: 17069 - DNA, 15 bp, synthetic construct
  source 1..15: mol_type = other DNA
acaatgaaagaacac

SEQ ID NO: 17070 - DNA, 15 bp, synthetic construct
  source 1..15: mol_type = other DNA
gcagctaccatttag

SEQ ID NO: 17071 - DNA, 15 bp, synthetic construct
  source 1..15: mol_type = other DNA
accatgtacataact

SEQ ID NO: 17072 - DNA, 15 bp, synthetic construct
  source 1..15: mol_type = other DNA
agaatcagccacgat

SEQ ID NO: 17073 - DNA, 15 bp, synthetic construct
  source 1..15: mol_type = other DNA
cagcattttaaacgc

SEQ ID NO: 17074 - DNA, 15 bp, synthetic construct
  source 1..15: mol_type = other DNA
cacgtatacatcatt

SEQ ID NO: 17075 - DNA, 15 bp, synthetic construct
  source 1..15: mol_type = other DNA
ctttgcatctctgta

SEQ ID NO: 17076 - DNA, 15 bp, synthetic construct
  source 1..15: mol_type = other DNA
ttgtgattccaccat

SEQ ID NO: 17077 - DNA, 15 bp, synthetic construct
  source 1..15: mol_type = other DNA
atatgaagaatgtta

SEQ ID NO: 17078 - DNA, 15 bp, synthetic construct
  source 1..15: mol_type = other DNA
aagaggccagataga

SEQ ID NO: 17079 - DNA, 15 bp, synthetic construct
  source 1..15: mol_type = other DNA
actgagttttcagga

SEQ ID NO: 17080 - DNA, 15 bp, synthetic construct
  source 1..15: mol_type = other DNA
gtatttccaagtcat

SEQ ID NO: 17081 - DNA, 15 bp, synthetic construct
  source 1..15: mol_type = other DNA
ctggataagttcttc

SEQ ID NO: 17082 - DNA, 15 bp, synthetic construct
  source 1..15: mol_type = other DNA
catcccatgtttaca

SEQ ID NO: 17083 - DNA, 15 bp, synthetic construct
  source 1..15: mol_type = other DNA
ctggcttcttcaagt

SEQ ID NO: 17084 - DNA, 15 bp, synthetic construct
  source 1..15: mol_type = other DNA
cacatattccctttg

SEQ ID NO: 17085 - DNA, 15 bp, synthetic construct
  source 1..15: mol_type = other DNA
gcgtaatacagaagt

SEQ ID NO: 17086 - DNA, 15 bp, synthetic construct
  source 1..15: mol_type = other DNA
aaaatgaaaccctca

SEQ ID NO: 17087 - DNA, 15 bp, synthetic construct
  source 1..15: mol_type = other DNA
tggagtttgcctgta

SEQ ID NO: 17088 - DNA, 15 bp, synthetic construct
  source 1..15: mol_type = other DNA
attccttttcatctt

SEQ ID NO: 17089 - DNA, 15 bp, synthetic construct
  source 1..15: mol_type = other DNA
aattttactgagtca

SEQ ID NO: 17090 - DNA, 15 bp, synthetic construct
  source 1..15: mol_type = other DNA
tgcagaaacttcaac

SEQ ID NO: 17091 - DNA, 15 bp, synthetic construct
  source 1..15: mol_type = other DNA
atcctcctgcttgcg

SEQ ID NO: 17092 - DNA, 15 bp, synthetic construct
  source 1..15: mol_type = other DNA
tgtaggtcacaaagg

SEQ ID NO: 17093 - DNA, 15 bp, synthetic construct
  source 1..15: mol_type = other DNA
aagttcataactgta

SEQ ID NO: 17094 - DNA, 15 bp, synthetic construct
  source 1..15: mol_type = other DNA
ataagatgcccatta

SEQ ID NO: 17095 - DNA, 15 bp, synthetic construct
  source 1..15: mol_type = other DNA
cataggtttttaaca

SEQ ID NO: 17096 - DNA, 15 bp, synthetic construct
  source 1..15: mol_type = other DNA
gttttatgttgtttt

SEQ ID NO: 17097 - DNA, 15 bp, synthetic construct
  source 1..15: mol_type = other DNA
atcttcaatgagttc

SEQ ID NO: 17098 - DNA, 15 bp, synthetic construct
  source 1..15: mol_type = other DNA
tcaacatgaaatgat

SEQ ID NO: 17099 - DNA, 15 bp, synthetic construct
  source 1..15: mol_type = other DNA
ttccatactgctcac

SEQ ID NO: 17100 - DNA, 15 bp, synthetic construct
  source 1..15: mol_type = other DNA
ctggtaaatagtgtc

SEQ ID NO: 17101 - DNA, 15 bp, synthetic construct
  source 1..15: mol_type = other DNA
ctcacaaatgcatct

SEQ ID NO: 17102 - DNA, 15 bp, synthetic construct
  source 1..15: mol_type = other DNA
acatctgaggatgct

SEQ ID NO: 17103 - DNA, 15 bp, synthetic construct
  source 1..15: mol_type = other DNA
tctatgcccctctca

SEQ ID NO: 17104 - DNA, 15 bp, synthetic construct
  source 1..15: mol_type = other DNA
aaaaatggaggtcat

SEQ ID NO: 17105 - DNA, 15 bp, synthetic construct
  source 1..15: mol_type = other DNA
tgaaagagaaaagcg

SEQ ID NO: 17106 - DNA, 15 bp, synthetic construct
  source 1..15: mol_type = other DNA
cagaagtggctttat

SEQ ID NO: 17107 - DNA, 15 bp, synthetic construct
  source 1..15: mol_type = other DNA
gtcctgaaatgaact

SEQ ID NO: 17108 - DNA, 15 bp, synthetic construct
  source 1..15: mol_type = other DNA
agttggagttgttct

SEQ ID NO: 17109 - DNA, 15 bp, synthetic construct
  source 1..15: mol_type = other DNA
accagctgtgagtac

SEQ ID NO: 17110 - DNA, 15 bp, synthetic construct
  source 1..15: mol_type = other DNA
aagctgaatagcaat

SEQ ID NO: 17111 - DNA, 15 bp, synthetic construct
  source 1..15: mol_type = other DNA
cctggtcacattagg

SEQ ID NO: 17112 - DNA, 15 bp, synthetic construct
  source 1..15: mol_type = other DNA
tgatgacctaaaagt

SEQ ID NO: 17113 - DNA, 15 bp, synthetic construct
  source 1..15: mol_type = other DNA
aaatggaaaacgtga

SEQ ID NO: 17114 - DNA, 15 bp, synthetic construct
  source 1..15: mol_type = other DNA
catgtagcataagca

SEQ ID NO: 17115 - DNA, 15 bp, synthetic construct
  source 1..15: mol_type = other DNA
acagccaatacacct

SEQ ID NO: 17116 - DNA, 15 bp, synthetic construct
  source 1..15: mol_type = other DNA
cccgatactggagaa

SEQ ID NO: 17117 - DNA, 15 bp, synthetic construct
  source 1..15: mol_type = other DNA
acagccaatacacct

SEQ ID NO: 17118 - DNA, 15 bp, synthetic construct
  source 1..15: mol_type = other DNA
cccgatactggagaa

SEQ ID NO: 17119 - DNA, 15 bp, synthetic construct
  source 1..15: mol_type = other DNA
atcaagcgcctgaat

SEQ ID NO: 17120 - DNA, 15 bp, synthetic construct
  source 1..15: mol_type = other DNA
caaggagtgtgaagt

SEQ ID NO: 17121 - DNA, 15 bp, synthetic construct
  source 1..15: mol_type = other DNA
tctatcttgctcaag

SEQ ID NO: 17122 - DNA, 15 bp, synthetic construct
  source 1..15: mol_type = other DNA
gattatgaggttgtc

SEQ ID NO: 17123 - DNA, 15 bp, synthetic construct
  source 1..15: mol_type = other DNA
caggagaagcttaca

SEQ ID NO: 17124 - DNA, 15 bp, synthetic construct
  source 1..15: mol_type = other DNA
tgttttgtgtaatcc

SEQ ID NO: 17125 - DNA, 15 bp, synthetic construct
  source 1..15: mol_type = other DNA
accaaaaagaatgtt

SEQ ID NO: 17126 - DNA, 15 bp, synthetic construct
  source 1..15: mol_type = other DNA
tactcaaaatttggc

SEQ ID NO: 17127 - DNA, 15 bp, synthetic construct
  source 1..15: mol_type = other DNA
caacaaacagaccaa

SEQ ID NO: 17128 - DNA, 15 bp, synthetic construct
  source 1..15: mol_type = other DNA
tctcttctcagcatt

SEQ ID NO: 17129 - DNA, 15 bp, synthetic construct
  source 1..15: mol_type = other DNA
tcagggttcaatacg

SEQ ID NO: 17130 - DNA, 15 bp, synthetic construct
  source 1..15: mol_type = other DNA
tgttaatgtggatgt

SEQ ID NO: 17131 - DNA, 15 bp, synthetic construct
  source 1..15: mol_type = other DNA
aaagctcttcctcta

SEQ ID NO: 17132 - DNA, 15 bp, synthetic construct
  source 1..15: mol_type = other DNA
agcccccgaatggtg

SEQ ID NO: 17133 - DNA, 15 bp, synthetic construct
  source 1..15: mol_type = other DNA
ttgcccgtttgggtg

SEQ ID NO: 17134 - DNA, 15 bp, synthetic construct
  source 1..15: mol_type = other DNA
ccctgcacttcttgc

SEQ ID NO: 17135 - DNA, 15 bp, synthetic construct
  source 1..15: mol_type = other DNA
atttagatcttttca

SEQ ID NO: 17136 - DNA, 15 bp, synthetic construct
  source 1..15: mol_type = other DNA
tgctgtctccctacc

SEQ ID NO: 17137 - DNA, 15 bp, synthetic construct
  source 1..15: mol_type = other DNA
atcctaattttcccc

SEQ ID NO: 17138 - DNA, 15 bp, synthetic construct
  source 1..15: mol_type = other DNA
gggccagggtcttca

SEQ ID NO: 17139 - DNA, 15 bp, synthetic construct
  source 1..15: mol_type = other DNA
caagttgggagagtt

SEQ ID NO: 17140 - DNA, 15 bp, synthetic construct
  source 1..15: mol_type = other DNA
ctcatctgtatacat

SEQ ID NO: 17141 - DNA, 15 bp, synthetic construct
  source 1..15: mol_type = other DNA
ggagaagtggttggt

SEQ ID NO: 17142 - DNA, 15 bp, synthetic construct
  source 1..15: mol_type = other DNA
cattcaagctacctc

SEQ ID NO: 17143 - DNA, 15 bp, synthetic construct
  source 1..15: mol_type = other DNA
cgcccttgactttac

SEQ ID NO: 17144 - DNA, 15 bp, synthetic construct
  source 1..15: mol_type = other DNA
tagaggtcagggaat

SEQ ID NO: 17145 - DNA, 15 bp, synthetic construct
  source 1..15: mol_type = other DNA
gctctgttaaagaca

SEQ ID NO: 17146 - DNA, 15 bp, synthetic construct
  source 1..15: mol_type = other DNA
tactccctagaggtt

SEQ ID NO: 17147 - DNA, 15 bp, synthetic construct
  source 1..15: mol_type = other DNA
ttaaaaagaagagaa

SEQ ID NO: 17148 - DNA, 15 bp, synthetic construct
  source 1..15: mol_type = other DNA
atttcaaccaaatcg

SEQ ID NO: 17149 - DNA, 15 bp, synthetic construct
  source 1..15: mol_type = other DNA
ccacaaagaactaga

SEQ ID NO: 17150 - DNA, 15 bp, synthetic construct
  source 1..15: mol_type = other DNA
gactgcaaaggatgt

SEQ ID NO: 17151 - DNA, 15 bp, synthetic construct
  source 1..15: mol_type = other DNA
tacagtgtaatgtca

SEQ ID NO: 17152 - DNA, 15 bp, synthetic construct
  source 1..15: mol_type = other DNA
atcacacagagaaag

SEQ ID NO: 17153 - DNA, 15 bp, synthetic construct
  source 1..15: mol_type = other DNA
cacttaactgttcct

SEQ ID NO: 17154 - DNA, 15 bp, synthetic construct
  source 1..15: mol_type = other DNA
gacagtgaaggatgc

SEQ ID NO: 17155 - DNA, 15 bp, synthetic construct
  source 1..15: mol_type = other DNA
caagtcaggttaaag

SEQ ID NO: 17156 - DNA, 15 bp, synthetic construct
  source 1..15: mol_type = other DNA
agggatctgtattgt

SEQ ID NO: 17157 - DNA, 15 bp, synthetic construct
  source 1..15: mol_type = other DNA
cagctacggaaaaca

SEQ ID NO: 17158 - DNA, 15 bp, synthetic construct
  source 1..15: mol_type = other DNA
ctgtattggcatcat

SEQ ID NO: 17159 - DNA, 15 bp, synthetic construct
  source 1..15: mol_type = other DNA
ctgacatcattgagc

SEQ ID NO: 17160 - DNA, 15 bp, synthetic construct
  source 1..15: mol_type = other DNA
aactgaagtagtcac

SEQ ID NO: 17161 - DNA, 15 bp, synthetic construct
  source 1..15: mol_type = other DNA
atctcctctcctctc

SEQ ID NO: 17162 - DNA, 15 bp, synthetic construct
  source 1..15: mol_type = other DNA
cattactgtcaatcc

SEQ ID NO: 17163 - DNA, 15 bp, synthetic construct
  source 1..15: mol_type = other DNA
agcttccatagtttc

SEQ ID NO: 17164 - DNA, 15 bp, synthetic construct
  source 1..15: mol_type = other DNA
agaaattgaaactag

SEQ ID NO: 17165 - DNA, 15 bp, synthetic construct
  source 1..15: mol_type = other DNA
tttacttcagctagt

SEQ ID NO: 17166 - DNA, 15 bp, synthetic construct
  source 1..15: mol_type = other DNA
tgaagtaaacacgca

SEQ ID NO: 17167 - DNA, 15 bp, synthetic construct
  source 1..15: mol_type = other DNA
ttcatcccatttgat

SEQ ID NO: 17168 - DNA, 15 bp, synthetic construct
  source 1..15: mol_type = other DNA
cagatttgcatcttt

SEQ ID NO: 17169 - DNA, 15 bp, synthetic construct
  source 1..15: mol_type = other DNA
ctgtgcacccgtctc

SEQ ID NO: 17170 - DNA, 15 bp, synthetic construct
  source 1..15: mol_type = other DNA
atgacactgtccaag

SEQ ID NO: 17171 - DNA, 15 bp, synthetic construct
  source 1..15: mol_type = other DNA
gaaagttctctttgg

SEQ ID NO: 17172 - DNA, 15 bp, synthetic construct
  source 1..15: mol_type = other DNA
ttcggcaatggagag

SEQ ID NO: 17173 - DNA, 15 bp, synthetic construct
  source 1..15: mol_type = other DNA
cagaatgctgacaag

SEQ ID NO: 17174 - DNA, 15 bp, synthetic construct
  source 1..15: mol_type = other DNA
ttagtagaaccactt

SEQ ID NO: 17175 - DNA, 15 bp, synthetic construct
  source 1..15: mol_type = other DNA
tgttacggattacac

SEQ ID NO: 17176 - DNA, 15 bp, synthetic construct
  source 1..15: mol_type = other DNA
tgaattttcgagggt

SEQ ID NO: 17177 - DNA, 15 bp, synthetic construct
  source 1..15: mol_type = other DNA
tggcgttttctatga

SEQ ID NO: 17178 - DNA, 15 bp, synthetic construct
  source 1..15: mol_type = other DNA
cttttggtggaagtg

SEQ ID NO: 17179 - DNA, 15 bp, synthetic construct
  source 1..15: mol_type = other DNA
ttctttttctttact

SEQ ID NO: 17180 - DNA, 15 bp, synthetic construct
  source 1..15: mol_type = other DNA
tcatgtggtctcata

SEQ ID NO: 17181 - DNA, 15 bp, synthetic construct
  source 1..15: mol_type = other DNA
catccacccatcagg

SEQ ID NO: 17182 - DNA, 15 bp, synthetic construct
  source 1..15: mol_type = other DNA
ggcacttaattcatg

SEQ ID NO: 17183 - DNA, 15 bp, synthetic construct
  source 1..15: mol_type = other DNA
ctttgctggaatgat

SEQ ID NO: 17184 - DNA, 15 bp, synthetic construct
  source 1..15: mol_type = other DNA
ttattggcgttgaca

SEQ ID NO: 17185 - DNA, 15 bp, synthetic construct
  source 1..15: mol_type = other DNA
tccttgcggatcctg

SEQ ID NO: 17186 - DNA, 15 bp, synthetic construct
  source 1..15: mol_type = other DNA
ggcatagtgctcata

SEQ ID NO: 17187 - DNA, 15 bp, synthetic construct
  source 1..15: mol_type = other DNA
ggctacaacacgatc

SEQ ID NO: 17188 - DNA, 15 bp, synthetic construct
  source 1..15: mol_type = other DNA
ggtagctgggtcgag

SEQ ID NO: 17189 - DNA, 15 bp, synthetic construct
  source 1..15: mol_type = other DNA
ctgacttgtggtctc

SEQ ID NO: 17190 - DNA, 15 bp, synthetic construct
  source 1..15: mol_type = other DNA
tttctggacatcacg

SEQ ID NO: 17191 - DNA, 15 bp, synthetic construct
  source 1..15: mol_type = other DNA
ggacttgtcgtttgg

SEQ ID NO: 17192 - DNA, 15 bp, synthetic construct
  source 1..15: mol_type = other DNA
tgcacctcaagttta

SEQ ID NO: 17193 - DNA, 15 bp, synthetic construct
  source 1..15: mol_type = other DNA
cctgcctaagctttg

SEQ ID NO: 17194 - DNA, 15 bp, synthetic construct
  source 1..15: mol_type = other DNA
acagcctgcctagag

SEQ ID NO: 17195 - DNA, 15 bp, synthetic construct
  source 1..15: mol_type = other DNA
ctacaccacgagatg

SEQ ID NO: 17196 - DNA, 15 bp, synthetic construct
  source 1..15: mol_type = other DNA
gcgaaagcgaaaatg

SEQ ID NO: 17197 - DNA, 15 bp, synthetic construct
  source 1..15: mol_type = other DNA
gtggcacctacttcc

SEQ ID NO: 17198 - DNA, 15 bp, synthetic construct
  source 1..15: mol_type = other DNA
tgatgggtgaagtca

SEQ ID NO: 17199 - DNA, 15 bp, synthetic construct
  source 1..15: mol_type = other DNA
tcctagcagagtgca

SEQ ID NO: 17200 - DNA, 15 bp, synthetic construct
  source 1..15: mol_type = other DNA
ttctccacgtgacca

SEQ ID NO: 17201 - DNA, 15 bp, synthetic construct
  source 1..15: mol_type = other DNA
cctgctgcataatgg

SEQ ID NO: 17202 - DNA, 15 bp, synthetic construct
  source 1..15: mol_type = other DNA
cacataccccggtag

SEQ ID NO: 17203 - DNA, 15 bp, synthetic construct
  source 1..15: mol_type = other DNA
ccaactatttagtgg

SEQ ID NO: 17204 - DNA, 15 bp, synthetic construct
  source 1..15: mol_type = other DNA
aggcctgatgagtaa

SEQ ID NO: 17205 - DNA, 15 bp, synthetic construct
  source 1..15: mol_type = other DNA
agccttactcatcag

SEQ ID NO: 17206 - DNA, 15 bp, synthetic construct
  source 1..15: mol_type = other DNA
gctcaccttgaggtc

SEQ ID NO: 17207 - DNA, 15 bp, synthetic construct
  source 1..15: mol_type = other DNA
gcggacatttttgtc

SEQ ID NO: 17208 - DNA, 15 bp, synthetic construct
  source 1..15: mol_type = other DNA
ctggattttagaagc

SEQ ID NO: 17209 - DNA, 15 bp, synthetic construct
  source 1..15: mol_type = other DNA
ccttagacaaggagg

SEQ ID NO: 17210 - DNA, 15 bp, synthetic construct
  source 1..15: mol_type = other DNA
ccaatggtggctgag

SEQ ID NO: 17211 - DNA, 15 bp, synthetic construct
  source 1..15: mol_type = other DNA
attttctggacgacc

SEQ ID NO: 17212 - DNA, 15 bp, synthetic construct
  source 1..15: mol_type = other DNA
gatgctctgatcatt

SEQ ID NO: 17213 - DNA, 15 bp, synthetic construct
  source 1..15: mol_type = other DNA
aggacagagtaagga

SEQ ID NO: 17214 - DNA, 15 bp, synthetic construct
  source 1..15: mol_type = other DNA
cagtacctggtaata

SEQ ID NO: 17215 - DNA, 15 bp, synthetic construct
  source 1..15: mol_type = other DNA
tggctggaacttcac

SEQ ID NO: 17216 - DNA, 15 bp, synthetic construct
  source 1..15: mol_type = other DNA
tccacccacaagtcg

SEQ ID NO: 17217 - DNA, 15 bp, synthetic construct
  source 1..15: mol_type = other DNA
atgaagtgccacaga

SEQ ID NO: 17218 - DNA, 15 bp, synthetic construct
  source 1..15: mol_type = other DNA
atctcgacccctttc

SEQ ID NO: 17219 - DNA, 15 bp, synthetic construct
  source 1..15: mol_type = other DNA
cctgtttaatagaaa

SEQ ID NO: 17220 - DNA, 15 bp, synthetic construct
  source 1..15: mol_type = other DNA
gaaggccacagcgat

SEQ ID NO: 17221 - DNA, 15 bp, synthetic construct
  source 1..15: mol_type = other DNA
gatcggcttcttcgg

SEQ ID NO: 17222 - DNA, 15 bp, synthetic construct
  source 1..15: mol_type = other DNA
ttagcctcttagtgc

SEQ ID NO: 17223 - DNA, 15 bp, synthetic construct
  source 1..15: mol_type = other DNA
tgagactgactgagc

SEQ ID NO: 17224 - DNA, 15 bp, synthetic construct
  source 1..15: mol_type = other DNA
cttaccaggcgagtt

SEQ ID NO: 17225 - DNA, 15 bp, synthetic construct
  source 1..15: mol_type = other DNA
cctctgctcctatgc

SEQ ID NO: 17226 - DNA, 15 bp, synthetic construct
  source 1..15: mol_type = other DNA
ctgctattattatat

SEQ ID NO: 17227 - DNA, 15 bp, synthetic construct
  source 1..15: mol_type = other DNA
gaaagaggctcgact

SEQ ID NO: 17228 - DNA, 15 bp, synthetic construct
  source 1..15: mol_type = other DNA
ttgtagatgacatag

SEQ ID NO: 17229 - DNA, 15 bp, synthetic construct
  source 1..15: mol_type = other DNA
tccgtggtcatcatg

SEQ ID NO: 17230 - DNA, 15 bp, synthetic construct
  source 1..15: mol_type = other DNA
ttgggagggataaag

SEQ ID NO: 17231 - DNA, 15 bp, synthetic construct
  source 1..15: mol_type = other DNA
actctgctctcaccc

SEQ ID NO: 17232 - DNA, 15 bp, synthetic construct
  source 1..15: mol_type = other DNA
ggaggctgcacatac

SEQ ID NO: 17233 - DNA, 15 bp, synthetic construct
  source 1..15: mol_type = other DNA
agtcaccctggattt

SEQ ID NO: 17234 - DNA, 15 bp, synthetic construct
  source 1..15: mol_type = other DNA
gatcatcaggctgag

SEQ ID NO: 17235 - DNA, 15 bp, synthetic construct
  source 1..15: mol_type = other DNA
gtgggcaccttcacc

SEQ ID NO: 17236 - DNA, 15 bp, synthetic construct
  source 1..15: mol_type = other DNA
gggtggacatcacac

SEQ ID NO: 17237 - DNA, 15 bp, synthetic construct
  source 1..15: mol_type = other DNA
tgttttcccttatct

SEQ ID NO: 17238 - DNA, 15 bp, synthetic construct
  source 1..15: mol_type = other DNA
atccgagtagaaggc

SEQ ID NO: 17239 - DNA, 15 bp, synthetic construct
  source 1..15: mol_type = other DNA
aacaagaggaagatc

SEQ ID NO: 17240 - DNA, 15 bp, synthetic construct
  source 1..15: mol_type = other DNA
taaaacaagtctcaa

SEQ ID NO: 17241 - DNA, 15 bp, synthetic construct
  source 1..15: mol_type = other DNA
gcacatctggagaca

SEQ ID NO: 17242 - DNA, 15 bp, synthetic construct
  source 1..15: mol_type = other DNA
ccaaattaacagacc

SEQ ID NO: 17243 - DNA, 15 bp, synthetic construct
  source 1..15: mol_type = other DNA
tctagatatctggtc

SEQ ID NO: 17244 - DNA, 15 bp, synthetic construct
  source 1..15: mol_type = other DNA
tttttccctctgcca

SEQ ID NO: 17245 - DNA, 15 bp, synthetic construct
  source 1..15: mol_type = other DNA
cctagcattaaggga

SEQ ID NO: 17246 - DNA, 15 bp, synthetic construct
  source 1..15: mol_type = other DNA
cctcgaccaagttcc

SEQ ID NO: 17247 - DNA, 15 bp, synthetic construct
  source 1..15: mol_type = other DNA
ccgtgttcaacatca

SEQ ID NO: 17248 - DNA, 15 bp, synthetic construct
  source 1..15: mol_type = other DNA
ctccatcgtcaaaga

SEQ ID NO: 17249 - DNA, 15 bp, synthetic construct
  source 1..15: mol_type = other DNA
agaccatagacatct

SEQ ID NO: 17250 - DNA, 15 bp, synthetic construct
  source 1..15: mol_type = other DNA
gctcttctctcaaag

SEQ ID NO: 17251 - DNA, 15 bp, synthetic construct
  source 1..15: mol_type = other DNA
agtgctctgtcctga

SEQ ID NO: 17252 - DNA, 15 bp, synthetic construct
  source 1..15: mol_type = other DNA
ggtagaggatctagg

SEQ ID NO: 17253 - DNA, 15 bp, synthetic construct
  source 1..15: mol_type = other DNA
accctccatgtgtcc

SEQ ID NO: 17254 - DNA, 15 bp, synthetic construct
  source 1..15: mol_type = other DNA
cctagtctaccaagg

SEQ ID NO: 17255 - DNA, 15 bp, synthetic construct
  source 1..15: mol_type = other DNA
ggcagtgtccgatgg

SEQ ID NO: 17256 - DNA, 15 bp, synthetic construct
  source 1..15: mol_type = other DNA
cttcgtaatctcctc

SEQ ID NO: 17257 - DNA, 15 bp, synthetic construct
  source 1..15: mol_type = other DNA
ccactgtcaacgaga

SEQ ID NO: 17258 - DNA, 15 bp, synthetic construct
  source 1..15: mol_type = other DNA
cactgagttccacag

SEQ ID NO: 17259 - DNA, 15 bp, synthetic construct
  source 1..15: mol_type = other DNA
tgagtgacctcgatg

SEQ ID NO: 17260 - DNA, 15 bp, synthetic construct
  source 1..15: mol_type = other DNA
tttatgggaactttg

SEQ ID NO: 17261 - DNA, 15 bp, synthetic construct
  source 1..15: mol_type = other DNA
cactttttcatgcct

SEQ ID NO: 17262 - DNA, 15 bp, synthetic construct
  source 1..15: mol_type = other DNA
catgagtctcatccc

SEQ ID NO: 17263 - DNA, 15 bp, synthetic construct
  source 1..15: mol_type = other DNA
tgtacccccgcactc

SEQ ID NO: 17264 - DNA, 15 bp, synthetic construct
  source 1..15: mol_type = other DNA
tggcacagccagtcg

SEQ ID NO: 17265 - DNA, 15 bp, synthetic construct
  source 1..15: mol_type = other DNA
gctcagacctgcgtc

SEQ ID NO: 17266 - DNA, 15 bp, synthetic construct
  source 1..15: mol_type = other DNA
cagtcctgttgagtg

SEQ ID NO: 17267 - DNA, 15 bp, synthetic construct
  source 1..15: mol_type = other DNA
gagttagggttgttg

SEQ ID NO: 17268 - DNA, 15 bp, synthetic construct
  source 1..15: mol_type = other DNA
gtacgcagctcgatg

SEQ ID NO: 17269 - DNA, 15 bp, synthetic construct
  source 1..15: mol_type = other DNA
accgtattggagttg

SEQ ID NO: 17270 - DNA, 15 bp, synthetic construct
  source 1..15: mol_type = other DNA
gggaagccttaggtc

SEQ ID NO: 17271 - DNA, 15 bp, synthetic construct
  source 1..15: mol_type = other DNA
tagccgcgtgctaga

SEQ ID NO: 17272 - DNA, 15 bp, synthetic construct
  source 1..15: mol_type = other DNA
gaaattcacctccat

SEQ ID NO: 17273 - DNA, 15 bp, synthetic construct
  source 1..15: mol_type = other DNA
tagccgcgtgctaga

SEQ ID NO: 17274 - DNA, 15 bp, synthetic construct
  source 1..15: mol_type = other DNA
gaaattcacctccat

SEQ ID NO: 17275 - DNA, 15 bp, synthetic construct
  source 1..15: mol_type = other DNA
actttccgtagctgc

SEQ ID NO: 17276 - DNA, 15 bp, synthetic construct
  source 1..15: mol_type = other DNA
tggaggttccatagg

SEQ ID NO: 17277 - DNA, 15 bp, synthetic construct
  source 1..15: mol_type = other DNA
actttccgtagctgc

SEQ ID NO: 17278 - DNA, 15 bp, synthetic construct
  source 1..15: mol_type = other DNA
tggaggttccatagg

SEQ ID NO: 17279 - DNA, 15 bp, synthetic construct
  source 1..15: mol_type = other DNA
ccatatccgtgcttg

SEQ ID NO: 17280 - DNA, 15 bp, synthetic construct
  source 1..15: mol_type = other DNA
atgaccattcatcaa

SEQ ID NO: 17281 - DNA, 15 bp, synthetic construct
  source 1..15: mol_type = other DNA
acagtcctaattggc

SEQ ID NO: 17282 - DNA, 15 bp, synthetic construct
  source 1..15: mol_type = other DNA
atggcatctacaact

SEQ ID NO: 17283 - DNA, 15 bp, synthetic construct
  source 1..15: mol_type = other DNA
cgagcacttgcatgg

SEQ ID NO: 17284 - DNA, 15 bp, synthetic construct
  source 1..15: mol_type = other DNA
gtagtggatgaagta

SEQ ID NO: 17285 - DNA, 15 bp, synthetic construct
  source 1..15: mol_type = other DNA
gccgccgctattacc

SEQ ID NO: 17286 - DNA, 15 bp, synthetic construct
  source 1..15: mol_type = other DNA
gtgcacatggctcac

SEQ ID NO: 17287 - DNA, 15 bp, synthetic construct
  source 1..15: mol_type = other DNA
cttcttcatcagtca

SEQ ID NO: 17288 - DNA, 15 bp, synthetic construct
  source 1..15: mol_type = other DNA
tctttaggccagggt

SEQ ID NO: 17289 - DNA, 15 bp, synthetic construct
  source 1..15: mol_type = other DNA
catcagggcttacgg

SEQ ID NO: 17290 - DNA, 15 bp, synthetic construct
  source 1..15: mol_type = other DNA
ggatggtgatgacac

SEQ ID NO: 17291 - DNA, 15 bp, synthetic construct
  source 1..15: mol_type = other DNA
gaccatgttgagatg

SEQ ID NO: 17292 - DNA, 15 bp, synthetic construct
  source 1..15: mol_type = other DNA
gtggaagtatactgt

SEQ ID NO: 17293 - DNA, 15 bp, synthetic construct
  source 1..15: mol_type = other DNA
ccgtggtcgtagatg

SEQ ID NO: 17294 - DNA, 15 bp, synthetic construct
  source 1..15: mol_type = other DNA
tttccctctcgcatg

SEQ ID NO: 17295 - DNA, 15 bp, synthetic construct
  source 1..15: mol_type = other DNA
ggtctgcaaagaagc

SEQ ID NO: 17296 - DNA, 15 bp, synthetic construct
  source 1..15: mol_type = other DNA
accttgctccatatc

SEQ ID NO: 17297 - DNA, 15 bp, synthetic construct
  source 1..15: mol_type = other DNA
gacctaagtgttcga

SEQ ID NO: 17298 - DNA, 15 bp, synthetic construct
  source 1..15: mol_type = other DNA
gagtactaccgcaag

SEQ ID NO: 17299 - DNA, 15 bp, synthetic construct
  source 1..15: mol_type = other DNA
acaggcttcccatag

SEQ ID NO: 17300 - DNA, 15 bp, synthetic construct
  source 1..15: mol_type = other DNA
gaacctggtcaacaa

SEQ ID NO: 17301 - DNA, 15 bp, synthetic construct
  source 1..15: mol_type = other DNA
acaggcttcccatag

SEQ ID NO: 17302 - DNA, 15 bp, synthetic construct
  source 1..15: mol_type = other DNA
gaacctggtcaacaa

SEQ ID NO: 17303 - DNA, 15 bp, synthetic construct
  source 1..15: mol_type = other DNA
tcgtcccgcacgtag

SEQ ID NO: 17304 - DNA, 15 bp, synthetic construct
  source 1..15: mol_type = other DNA
tacaaccggagctct

SEQ ID NO: 17305 - DNA, 15 bp, synthetic construct
  source 1..15: mol_type = other DNA
tcgtcccgcacgtag

SEQ ID NO: 17306 - DNA, 15 bp, synthetic construct
  source 1..15: mol_type = other DNA
tacaaccggagctct

SEQ ID NO: 17307 - DNA, 15 bp, synthetic construct
  source 1..15: mol_type = other DNA
aggtcttgccaaagc

SEQ ID NO: 17308 - DNA, 15 bp, synthetic construct
  source 1..15: mol_type = other DNA
actggatgtgctacc

SEQ ID NO: 17309 - DNA, 15 bp, synthetic construct
  source 1..15: mol_type = other DNA
aggtcttgccaaagc

SEQ ID NO: 17310 - DNA, 15 bp, synthetic construct
  source 1..15: mol_type = other DNA
actggatgtgctacc

SEQ ID NO: 17311 - DNA, 15 bp, synthetic construct
  source 1..15: mol_type = other DNA
ttgagatccagccag

SEQ ID NO: 17312 - DNA, 15 bp, synthetic construct
  source 1..15: mol_type = other DNA
aagtgtgctttgtac

SEQ ID NO: 17313 - DNA, 15 bp, synthetic construct
  source 1..15: mol_type = other DNA
acgtcattcctctaa

SEQ ID NO: 17314 - DNA, 15 bp, synthetic construct
  source 1..15: mol_type = other DNA
ctcaatgtgctcttc

SEQ ID NO: 17315 - DNA, 15 bp, synthetic construct
  source 1..15: mol_type = other DNA
taccgaggatgacgg

SEQ ID NO: 17316 - DNA, 15 bp, synthetic construct
  source 1..15: mol_type = other DNA
cccacaccagataag

SEQ ID NO: 17317 - DNA, 15 bp, synthetic construct
  source 1..15: mol_type = other DNA
ccctttcagtactaa

SEQ ID NO: 17318 - DNA, 15 bp, synthetic construct
  source 1..15: mol_type = other DNA
acctggacggttctc

SEQ ID NO: 17319 - DNA, 15 bp, synthetic construct
  source 1..15: mol_type = other DNA
atgtagattcccttg

SEQ ID NO: 17320 - DNA, 15 bp, synthetic construct
  source 1..15: mol_type = other DNA
caagacaggaaggtg

SEQ ID NO: 17321 - DNA, 15 bp, synthetic construct
  source 1..15: mol_type = other DNA
ccagcttctaattgg

SEQ ID NO: 17322 - DNA, 15 bp, synthetic construct
  source 1..15: mol_type = other DNA
tgctattagcgaact

SEQ ID NO: 17323 - DNA, 15 bp, synthetic construct
  source 1..15: mol_type = other DNA
tcccatcttcgtgat

SEQ ID NO: 17324 - DNA, 15 bp, synthetic construct
  source 1..15: mol_type = other DNA
aaggcagcagaataa

SEQ ID NO: 17325 - DNA, 15 bp, synthetic construct
  source 1..15: mol_type = other DNA
tttccacactaggag

SEQ ID NO: 17326 - DNA, 15 bp, synthetic construct
  source 1..15: mol_type = other DNA
tccaaagtgatcaga

SEQ ID NO: 17327 - DNA, 15 bp, synthetic construct
  source 1..15: mol_type = other DNA
ctcaaggtgacagaa

SEQ ID NO: 17328 - DNA, 15 bp, synthetic construct
  source 1..15: mol_type = other DNA
taagatgtactctgg

SEQ ID NO: 17329 - DNA, 15 bp, synthetic construct
  source 1..15: mol_type = other DNA
catgccatttctgaa

SEQ ID NO: 17330 - DNA, 15 bp, synthetic construct
  source 1..15: mol_type = other DNA
aacatgccagacttg

SEQ ID NO: 17331 - DNA, 15 bp, synthetic construct
  source 1..15: mol_type = other DNA
gcttctaccttttgc

SEQ ID NO: 17332 - DNA, 15 bp, synthetic construct
  source 1..15: mol_type = other DNA
ggacgaatccttttt

SEQ ID NO: 17333 - DNA, 15 bp, synthetic construct
  source 1..15: mol_type = other DNA
atttcagattctcga

SEQ ID NO: 17334 - DNA, 15 bp, synthetic construct
  source 1..15: mol_type = other DNA
ctgctcatctctatc

SEQ ID NO: 17335 - DNA, 15 bp, synthetic construct
  source 1..15: mol_type = other DNA
cactcacctgtgtct

SEQ ID NO: 17336 - DNA, 15 bp, synthetic construct
  source 1..15: mol_type = other DNA
gttcatgtatgagaa

SEQ ID NO: 17337 - DNA, 15 bp, synthetic construct
  source 1..15: mol_type = other DNA
cgaggataggaacac

SEQ ID NO: 17338 - DNA, 15 bp, synthetic construct
  source 1..15: mol_type = other DNA
agtctctggcatctg

SEQ ID NO: 17339 - DNA, 15 bp, synthetic construct
  source 1..15: mol_type = other DNA
ttgatgtttcagtct

SEQ ID NO: 17340 - DNA, 15 bp, synthetic construct
  source 1..15: mol_type = other DNA
catcaatcaaaaagt

SEQ ID NO: 17341 - DNA, 15 bp, synthetic construct
  source 1..15: mol_type = other DNA
aaaacgtgggtaact

SEQ ID NO: 17342 - DNA, 15 bp, synthetic construct
  source 1..15: mol_type = other DNA
gaggagatccagtaa

SEQ ID NO: 17343 - DNA, 15 bp, synthetic construct
  source 1..15: mol_type = other DNA
gttcctcacgtacct

SEQ ID NO: 17344 - DNA, 15 bp, synthetic construct
  source 1..15: mol_type = other DNA
agtccaaggaatgcg

SEQ ID NO: 17345 - DNA, 15 bp, synthetic construct
  source 1..15: mol_type = other DNA
actcagagctttggc

SEQ ID NO: 17346 - DNA, 15 bp, synthetic construct
  source 1..15: mol_type = other DNA
atcctcaatttgctg

SEQ ID NO: 17347 - DNA, 15 bp, synthetic construct
  source 1..15: mol_type = other DNA
ttgtctagtaactga

SEQ ID NO: 17348 - DNA, 15 bp, synthetic construct
  source 1..15: mol_type = other DNA
tttaagtcacaccac

SEQ ID NO: 17349 - DNA, 15 bp, synthetic construct
  source 1..15: mol_type = other DNA
gatgaggtcctctcc

SEQ ID NO: 17350 - DNA, 15 bp, synthetic construct
  source 1..15: mol_type = other DNA
cgtcaacagcaggtc

SEQ ID NO: 17351 - DNA, 15 bp, synthetic construct
  source 1..15: mol_type = other DNA
tgtccatcgaggagc

SEQ ID NO: 17352 - DNA, 15 bp, synthetic construct
  source 1..15: mol_type = other DNA
gtaggacatagaact

SEQ ID NO: 17353 - DNA, 15 bp, synthetic construct
  source 1..15: mol_type = other DNA
agacagcctatgtat

SEQ ID NO: 17354 - DNA, 15 bp, synthetic construct
  source 1..15: mol_type = other DNA
tgactaaaaatggga

SEQ ID NO: 17355 - DNA, 15 bp, synthetic construct
  source 1..15: mol_type = other DNA
actgggaaaagcaca

SEQ ID NO: 17356 - DNA, 15 bp, synthetic construct
  source 1..15: mol_type = other DNA
tccatagtctgttca

SEQ ID NO: 17357 - DNA, 15 bp, synthetic construct
  source 1..15: mol_type = other DNA
ccagtttcactttct

SEQ ID NO: 17358 - DNA, 15 bp, synthetic construct
  source 1..15: mol_type = other DNA
ccagagtatcaacag

SEQ ID NO: 17359 - DNA, 15 bp, synthetic construct
  source 1..15: mol_type = other DNA
aggctttcagaaacc

SEQ ID NO: 17360 - DNA, 15 bp, synthetic construct
  source 1..15: mol_type = other DNA
agaaggtaggcgttc

SEQ ID NO: 17361 - DNA, 15 bp, synthetic construct
  source 1..15: mol_type = other DNA
gccacatgtaatgtc

SEQ ID NO: 17362 - DNA, 15 bp, synthetic construct
  source 1..15: mol_type = other DNA
ctggatgagggcata

SEQ ID NO: 17363 - DNA, 15 bp, synthetic construct
  source 1..15: mol_type = other DNA
gaaatactacttgac

SEQ ID NO: 17364 - DNA, 15 bp, synthetic construct
  source 1..15: mol_type = other DNA
agctaacccgaccac

SEQ ID NO: 17365 - DNA, 15 bp, synthetic construct
  source 1..15: mol_type = other DNA
ctggtgccattatct

SEQ ID NO: 17366 - DNA, 15 bp, synthetic construct
  source 1..15: mol_type = other DNA
ccctctgtagagcat

SEQ ID NO: 17367 - DNA, 15 bp, synthetic construct
  source 1..15: mol_type = other DNA
ttatttacccacttc

SEQ ID NO: 17368 - DNA, 15 bp, synthetic construct
  source 1..15: mol_type = other DNA
ctcatctttcggtag

SEQ ID NO: 17369 - DNA, 15 bp, synthetic construct
  source 1..15: mol_type = other DNA
ctcgtcagttactac

SEQ ID NO: 17370 - DNA, 15 bp, synthetic construct
  source 1..15: mol_type = other DNA
taagcagcacaacgg

SEQ ID NO: 17371 - DNA, 15 bp, synthetic construct
  source 1..15: mol_type = other DNA
tgggccaaaagaaaa

SEQ ID NO: 17372 - DNA, 15 bp, synthetic construct
  source 1..15: mol_type = other DNA
ccaaaatcatgtgaa

SEQ ID NO: 17373 - DNA, 15 bp, synthetic construct
  source 1..15: mol_type = other DNA
tggtacctgggaacg

SEQ ID NO: 17374 - DNA, 15 bp, synthetic construct
  source 1..15: mol_type = other DNA
gtcttatcaccaaga

SEQ ID NO: 17375 - DNA, 15 bp, synthetic construct
  source 1..15: mol_type = other DNA
cagtagtgggtaatt

SEQ ID NO: 17376 - DNA, 15 bp, synthetic construct
  source 1..15: mol_type = other DNA
acatggaaaaattca

SEQ ID NO: 17377 - DNA, 15 bp, synthetic construct
  source 1..15: mol_type = other DNA
attatttagctctct

SEQ ID NO: 17378 - DNA, 15 bp, synthetic construct
  source 1..15: mol_type = other DNA
caggctaagatgatg

SEQ ID NO: 17379 - DNA, 15 bp, synthetic construct
  source 1..15: mol_type = other DNA
tggccctctaatagg

SEQ ID NO: 17380 - DNA, 15 bp, synthetic construct
  source 1..15: mol_type = other DNA
accttggtgtcaatc

SEQ ID NO: 17381 - DNA, 15 bp, synthetic construct
  source 1..15: mol_type = other DNA
ttgagtggtttcaga

SEQ ID NO: 17382 - DNA, 15 bp, synthetic construct
  source 1..15: mol_type = other DNA
ctctctctaacaaga

SEQ ID NO: 17383 - DNA, 15 bp, synthetic construct
  source 1..15: mol_type = other DNA
agatccgagtgtgca

SEQ ID NO: 17384 - DNA, 15 bp, synthetic construct
  source 1..15: mol_type = other DNA
agttatagggcatgt

SEQ ID NO: 17385 - DNA, 15 bp, synthetic construct
  source 1..15: mol_type = other DNA
aagtactgatgacct

SEQ ID NO: 17386 - DNA, 15 bp, synthetic construct
  source 1..15: mol_type = other DNA
ttcagtcggccttta

SEQ ID NO: 17387 - DNA, 15 bp, synthetic construct
  source 1..15: mol_type = other DNA
aaaagggcctgaccc

SEQ ID NO: 17388 - DNA, 15 bp, synthetic construct
  source 1..15: mol_type = other DNA
actctgctgaaccgt

SEQ ID NO: 17389 - DNA, 15 bp, synthetic construct
  source 1..15: mol_type = other DNA
tctagaaaccctata

SEQ ID NO: 17390 - DNA, 15 bp, synthetic construct
  source 1..15: mol_type = other DNA
catatttctctgtcc

SEQ ID NO: 17391 - DNA, 15 bp, synthetic construct
  source 1..15: mol_type = other DNA
catgcagatgaatca

SEQ ID NO: 17392 - DNA, 15 bp, synthetic construct
  source 1..15: mol_type = other DNA
aaacaagacaaccag

SEQ ID NO: 17393 - DNA, 15 bp, synthetic construct
  source 1..15: mol_type = other DNA
cagtgtcactctaga

SEQ ID NO: 17394 - DNA, 15 bp, synthetic construct
  source 1..15: mol_type = other DNA
gccggacgtttaaaa

SEQ ID NO: 17395 - DNA, 15 bp, synthetic construct
  source 1..15: mol_type = other DNA
atagatgcatattta

SEQ ID NO: 17396 - DNA, 15 bp, synthetic construct
  source 1..15: mol_type = other DNA
agaaagttgggatcg

SEQ ID NO: 17397 - DNA, 15 bp, synthetic construct
  source 1..15: mol_type = other DNA
ctccttccagatgat

SEQ ID NO: 17398 - DNA, 15 bp, synthetic construct
  source 1..15: mol_type = other DNA
tttttgaagccagca

SEQ ID NO: 17399 - DNA, 15 bp, synthetic construct
  source 1..15: mol_type = other DNA
gaactaggcctatga

SEQ ID NO: 17400 - DNA, 15 bp, synthetic construct
  source 1..15: mol_type = other DNA
tattcacgggccgtt

SEQ ID NO: 17401 - DNA, 15 bp, synthetic construct
  source 1..15: mol_type = other DNA
agttgcaaaacttct

SEQ ID NO: 17402 - DNA, 15 bp, synthetic construct
  source 1..15: mol_type = other DNA
tttaaccagggcatc

SEQ ID NO: 17403 - DNA, 15 bp, synthetic construct
  source 1..15: mol_type = other DNA
aaccagctctttctg

SEQ ID NO: 17404 - DNA, 15 bp, synthetic construct
  source 1..15: mol_type = other DNA
tctgaagaaagcaac

SEQ ID NO: 17405 - DNA, 15 bp, synthetic construct
  source 1..15: mol_type = other DNA
catccagctatgaat

SEQ ID NO: 17406 - DNA, 15 bp, synthetic construct
  source 1..15: mol_type = other DNA
cagattagcgtcttc

SEQ ID NO: 17407 - DNA, 15 bp, synthetic construct
  source 1..15: mol_type = other DNA
gagccgtctcggaag

SEQ ID NO: 17408 - DNA, 15 bp, synthetic construct
  source 1..15: mol_type = other DNA
agcgcgatgtagctg

SEQ ID NO: 17409 - DNA, 15 bp, synthetic construct
  source 1..15: mol_type = other DNA
gggcgtctattccgg

SEQ ID NO: 17410 - DNA, 15 bp, synthetic construct
  source 1..15: mol_type = other DNA
ttctcccggtagaag

SEQ ID NO: 17411 - DNA, 15 bp, synthetic construct
  source 1..15: mol_type = other DNA
agaagatcaccttga

SEQ ID NO: 17412 - DNA, 15 bp, synthetic construct
  source 1..15: mol_type = other DNA
acgtccttctttttg

SEQ ID NO: 17413 - DNA, 15 bp, synthetic construct
  source 1..15: mol_type = other DNA
gacccggactcctac

SEQ ID NO: 17414 - DNA, 15 bp, synthetic construct
  source 1..15: mol_type = other DNA
cagcgtctccacctt

SEQ ID NO: 17415 - DNA, 15 bp, synthetic construct
  source 1..15: mol_type = other DNA
gtggtgatcaagagc

SEQ ID NO: 17416 - DNA, 15 bp, synthetic construct
  source 1..15: mol_type = other DNA
cagggtcatgatgtt

SEQ ID NO: 17417 - DNA, 15 bp, synthetic construct
  source 1..15: mol_type = other DNA
cgctgccggagcacc

SEQ ID NO: 17418 - DNA, 15 bp, synthetic construct
  source 1..15: mol_type = other DNA
tcggccccggtgtac

SEQ ID NO: 17419 - DNA, 15 bp, synthetic construct
  source 1..15: mol_type = other DNA
ggcgctgccctacgc

SEQ ID NO: 17420 - DNA, 15 bp, synthetic construct
  source 1..15: mol_type = other DNA
gttgagagcgctcag

SEQ ID NO: 17421 - DNA, 15 bp, synthetic construct
  source 1..15: mol_type = other DNA
acgaggccctctcgg

SEQ ID NO: 17422 - DNA, 15 bp, synthetic construct
  source 1..15: mol_type = other DNA
gggccgcgaacgtgt

SEQ ID NO: 17423 - DNA, 15 bp, synthetic construct
  source 1..15: mol_type = other DNA
ggtatctcaaccaca

SEQ ID NO: 17424 - DNA, 15 bp, synthetic construct
  source 1..15: mol_type = other DNA
cacgtcagtatttcg

SEQ ID NO: 17425 - DNA, 15 bp, synthetic construct
  source 1..15: mol_type = other DNA
ctttccccaacgtgc

SEQ ID NO: 17426 - DNA, 15 bp, synthetic construct
  source 1..15: mol_type = other DNA
agccccttaattgtc

SEQ ID NO: 17427 - DNA, 15 bp, synthetic construct
  source 1..15: mol_type = other DNA
actccgacgtcatcg

SEQ ID NO: 17428 - DNA, 15 bp, synthetic construct
  source 1..15: mol_type = other DNA
cccgagtgctaggga

SEQ ID NO: 17429 - DNA, 15 bp, synthetic construct
  source 1..15: mol_type = other DNA
tctgtgtttctctct

SEQ ID NO: 17430 - DNA, 15 bp, synthetic construct
  source 1..15: mol_type = other DNA
agcatcacaagttgc

SEQ ID NO: 17431 - DNA, 15 bp, synthetic construct
  source 1..15: mol_type = other DNA
gctgcttttaaagat

SEQ ID NO: 17432 - DNA, 15 bp, synthetic construct
  source 1..15: mol_type = other DNA
tcgcctggaaagatg

SEQ ID NO: 17433 - DNA, 15 bp, synthetic construct
  source 1..15: mol_type = other DNA
caaggccttctacgt

SEQ ID NO: 17434 - DNA, 15 bp, synthetic construct
  source 1..15: mol_type = other DNA
acatctaggacatcg

SEQ ID NO: 17435 - DNA, 15 bp, synthetic construct
  source 1..15: mol_type = other DNA
gatgtcctagatgtc

SEQ ID NO: 17436 - DNA, 15 bp, synthetic construct
  source 1..15: mol_type = other DNA
tagccccaaccaaga

SEQ ID NO: 17437 - DNA, 15 bp, synthetic construct
  source 1..15: mol_type = other DNA
tctgagctggaaaag

SEQ ID NO: 17438 - DNA, 15 bp, synthetic construct
  source 1..15: mol_type = other DNA
ctcaacacatcctac

SEQ ID NO: 17439 - DNA, 15 bp, synthetic construct
  source 1..15: mol_type = other DNA
tgagccctgactctt

SEQ ID NO: 17440 - DNA, 15 bp, synthetic construct
  source 1..15: mol_type = other DNA
ctgggatgagggaga

SEQ ID NO: 17441 - DNA, 15 bp, synthetic construct
  source 1..15: mol_type = other DNA
gcgtctccctcatcc

SEQ ID NO: 17442 - DNA, 15 bp, synthetic construct
  source 1..15: mol_type = other DNA
cactgagcagaacag

SEQ ID NO: 17443 - DNA, 15 bp, synthetic construct
  source 1..15: mol_type = other DNA
gactgaggctctttc

SEQ ID NO: 17444 - DNA, 15 bp, synthetic construct
  source 1..15: mol_type = other DNA
ctctcgggcatgagt

SEQ ID NO: 17445 - DNA, 15 bp, synthetic construct
  source 1..15: mol_type = other DNA
ctcatacctgagagc

SEQ ID NO: 17446 - DNA, 15 bp, synthetic construct
  source 1..15: mol_type = other DNA
ggtcatgagcttgat

SEQ ID NO: 17447 - DNA, 15 bp, synthetic construct
  source 1..15: mol_type = other DNA
cgctctgtgctttag

SEQ ID NO: 17448 - DNA, 15 bp, synthetic construct
  source 1..15: mol_type = other DNA
acgcgagaggctact

SEQ ID NO: 17449 - DNA, 15 bp, synthetic construct
  source 1..15: mol_type = other DNA
ttactggagagtagc

SEQ ID NO: 17450 - DNA, 15 bp, synthetic construct
  source 1..15: mol_type = other DNA
gaagacagaaggaac

SEQ ID NO: 17451 - DNA, 15 bp, synthetic construct
  source 1..15: mol_type = other DNA
tcgctttctacaacc

SEQ ID NO: 17452 - DNA, 15 bp, synthetic construct
  source 1..15: mol_type = other DNA
tgaaggtgtgctggt

SEQ ID NO: 17453 - DNA, 15 bp, synthetic construct
  source 1..15: mol_type = other DNA
tgaagcgggttctct

SEQ ID NO: 17454 - DNA, 15 bp, synthetic construct
  source 1..15: mol_type = other DNA
tgaaggcctccatca

SEQ ID NO: 17455 - DNA, 15 bp, synthetic construct
  source 1..15: mol_type = other DNA
taggcccctgaaaag

SEQ ID NO: 17456 - DNA, 15 bp, synthetic construct
  source 1..15: mol_type = other DNA
gcttctcacttgtcc

SEQ ID NO: 17457 - DNA, 15 bp, synthetic construct
  source 1..15: mol_type = other DNA
taggcccctgaaaag

SEQ ID NO: 17458 - DNA, 15 bp, synthetic construct
  source 1..15: mol_type = other DNA
gcttctcacttgtcc

SEQ ID NO: 17459 - DNA, 15 bp, synthetic construct
  source 1..15: mol_type = other DNA
gcccgtgtgattcac

SEQ ID NO: 17460 - DNA, 15 bp, synthetic construct
  source 1..15: mol_type = other DNA
aaagccgtggcactg

SEQ ID NO: 17461 - DNA, 15 bp, synthetic construct
  source 1..15: mol_type = other DNA
gcccgtgtgattcac

SEQ ID NO: 17462 - DNA, 15 bp, synthetic construct
  source 1..15: mol_type = other DNA
aaagccgtggcactg

SEQ ID NO: 17463 - DNA, 15 bp, synthetic construct
  source 1..15: mol_type = other DNA
cgctggtctgtgttt

SEQ ID NO: 17464 - DNA, 15 bp, synthetic construct
  source 1..15: mol_type = other DNA
agggactcacctcct

SEQ ID NO: 17465 - DNA, 15 bp, synthetic construct
  source 1..15: mol_type = other DNA
tccccctgactgaga

SEQ ID NO: 17466 - DNA, 15 bp, synthetic construct
  source 1..15: mol_type = other DNA
gttcacgcggcagct

SEQ ID NO: 17467 - DNA, 15 bp, synthetic construct
  source 1..15: mol_type = other DNA
tccccctgactgaga

SEQ ID NO: 17468 - DNA, 15 bp, synthetic construct
  source 1..15: mol_type = other DNA
gttcacgcggcagct

SEQ ID NO: 17469 - DNA, 15 bp, synthetic construct
  source 1..15: mol_type = other DNA
gtccttaccccacac

SEQ ID NO: 17470 - DNA, 15 bp, synthetic construct
  source 1..15: mol_type = other DNA
cagaggccggtgtcg

SEQ ID NO: 17471 - DNA, 15 bp, synthetic construct
  source 1..15: mol_type = other DNA
cttggcccctcgaca

SEQ ID NO: 17472 - DNA, 15 bp, synthetic construct
  source 1..15: mol_type = other DNA
gtcactgtcctcaat

SEQ ID NO: 17473 - DNA, 15 bp, synthetic construct
  source 1..15: mol_type = other DNA
cttggcccctcgaca

SEQ ID NO: 17474 - DNA, 15 bp, synthetic construct
  source 1..15: mol_type = other DNA
gtcactgtcctcaat

SEQ ID NO: 17475 - DNA, 15 bp, synthetic construct
  source 1..15: mol_type = other DNA
cagctttctctctag

SEQ ID NO: 17476 - DNA, 15 bp, synthetic construct
  source 1..15: mol_type = other DNA
ccacgtgtactgtag

SEQ ID NO: 17477 - DNA, 15 bp, synthetic construct
  source 1..15: mol_type = other DNA
aatgtgttccctgtg

SEQ ID NO: 17478 - DNA, 15 bp, synthetic construct
  source 1..15: mol_type = other DNA
caggaaccatgaacg

SEQ ID NO: 17479 - DNA, 15 bp, synthetic construct
  source 1..15: mol_type = other DNA
ctgcccttaagcgag

SEQ ID NO: 17480 - DNA, 15 bp, synthetic construct
  source 1..15: mol_type = other DNA
atgcagcttactgtt

SEQ ID NO: 17481 - DNA, 15 bp, synthetic construct
  source 1..15: mol_type = other DNA
tggacaacagtaagc

SEQ ID NO: 17482 - DNA, 15 bp, synthetic construct
  source 1..15: mol_type = other DNA
agattcagaaagacg

SEQ ID NO: 17483 - DNA, 15 bp, synthetic construct
  source 1..15: mol_type = other DNA
atcatccacgacgac

SEQ ID NO: 17484 - DNA, 15 bp, synthetic construct
  source 1..15: mol_type = other DNA
agaggttgagacata

SEQ ID NO: 17485 - DNA, 15 bp, synthetic construct
  source 1..15: mol_type = other DNA
gcagctccacttgac

SEQ ID NO: 17486 - DNA, 15 bp, synthetic construct
  source 1..15: mol_type = other DNA
cactcctgtcactta

SEQ ID NO: 17487 - DNA, 15 bp, synthetic construct
  source 1..15: mol_type = other DNA
tagatgcggccactg

SEQ ID NO: 17488 - DNA, 15 bp, synthetic construct
  source 1..15: mol_type = other DNA
cgacctgcgggccta

SEQ ID NO: 17489 - DNA, 15 bp, synthetic construct
  source 1..15: mol_type = other DNA
gtaggcccgcaggtc

SEQ ID NO: 17490 - DNA, 15 bp, synthetic construct
  source 1..15: mol_type = other DNA
cggtacaggcttccg

SEQ ID NO: 17491 - DNA, 15 bp, synthetic construct
  source 1..15: mol_type = other DNA
tcccctgaacttctc

SEQ ID NO: 17492 - DNA, 15 bp, synthetic construct
  source 1..15: mol_type = other DNA
atgtggtctgaatga

SEQ ID NO: 17493 - DNA, 15 bp, synthetic construct
  source 1..15: mol_type = other DNA
cccatcacagaatag

SEQ ID NO: 17494 - DNA, 15 bp, synthetic construct
  source 1..15: mol_type = other DNA
cagctttacgacagg

SEQ ID NO: 17495 - DNA, 15 bp, synthetic construct
  source 1..15: mol_type = other DNA
tgatttgggtccttc

SEQ ID NO: 17496 - DNA, 15 bp, synthetic construct
  source 1..15: mol_type = other DNA
ttgtcttacaggtaa

SEQ ID NO: 17497 - DNA, 15 bp, synthetic construct
  source 1..15: mol_type = other DNA
ggttggttgagatct

SEQ ID NO: 17498 - DNA, 15 bp, synthetic construct
  source 1..15: mol_type = other DNA
ggttgatggaacagg

SEQ ID NO: 17499 - DNA, 15 bp, synthetic construct
  source 1..15: mol_type = other DNA
tgcttagtaagctct

SEQ ID NO: 17500 - DNA, 15 bp, synthetic construct
  source 1..15: mol_type = other DNA
tgattggagtgattt

SEQ ID NO: 17501 - DNA, 15 bp, synthetic construct
  source 1..15: mol_type = other DNA
aaactcctcttttca

SEQ ID NO: 17502 - DNA, 15 bp, synthetic construct
  source 1..15: mol_type = other DNA
cctggtttatgatgc

SEQ ID NO: 17503 - DNA, 15 bp, synthetic construct
  source 1..15: mol_type = other DNA
aaactcctcttttca

SEQ ID NO: 17504 - DNA, 15 bp, synthetic construct
  source 1..15: mol_type = other DNA
cctggtttatgatgc

SEQ ID NO: 17505 - DNA, 15 bp, synthetic construct
  source 1..15: mol_type = other DNA
cgctttcttgtgatc

SEQ ID NO: 17506 - DNA, 15 bp, synthetic construct
  source 1..15: mol_type = other DNA
tgggacaactttctg

SEQ ID NO: 17507 - DNA, 15 bp, synthetic construct
  source 1..15: mol_type = other DNA
tcgccagtccttacc

SEQ ID NO: 17508 - DNA, 15 bp, synthetic construct
  source 1..15: mol_type = other DNA
gatgtagggcaccca

SEQ ID NO: 17509 - DNA, 15 bp, synthetic construct
  source 1..15: mol_type = other DNA
tctgagcttcgactt

SEQ ID NO: 17510 - DNA, 15 bp, synthetic construct
  source 1..15: mol_type = other DNA
acgtcgttgctgttc

SEQ ID NO: 17511 - DNA, 15 bp, synthetic construct
  source 1..15: mol_type = other DNA
tctgagcttcgactt

SEQ ID NO: 17512 - DNA, 15 bp, synthetic construct
  source 1..15: mol_type = other DNA
acgtcgttgctgttc

SEQ ID NO: 17513 - DNA, 15 bp, synthetic construct
  source 1..15: mol_type = other DNA
aaataccccaacgga

SEQ ID NO: 17514 - DNA, 15 bp, synthetic construct
  source 1..15: mol_type = other DNA
gtcaaaggtgaggtg

SEQ ID NO: 17515 - DNA, 15 bp, synthetic construct
  source 1..15: mol_type = other DNA
aagcccgccctatcc

SEQ ID NO: 17516 - DNA, 15 bp, synthetic construct
  source 1..15: mol_type = other DNA
tacctgtggaaaata

SEQ ID NO: 17517 - DNA, 15 bp, synthetic construct
  source 1..15: mol_type = other DNA
ctgcttctcctacat

SEQ ID NO: 17518 - DNA, 15 bp, synthetic construct
  source 1..15: mol_type = other DNA
cgatctcctgtgatt

SEQ ID NO: 17519 - DNA, 15 bp, synthetic construct
  source 1..15: mol_type = other DNA
ggaggaatgagaacc

SEQ ID NO: 17520 - DNA, 15 bp, synthetic construct
  source 1..15: mol_type = other DNA
gactcaccgttgttg

SEQ ID NO: 17521 - DNA, 15 bp, synthetic construct
  source 1..15: mol_type = other DNA
atgttcctccagtcc

SEQ ID NO: 17522 - DNA, 15 bp, synthetic construct
  source 1..15: mol_type = other DNA
tggtgttaggttggc

SEQ ID NO: 17523 - DNA, 15 bp, synthetic construct
  source 1..15: mol_type = other DNA
ctggaggctttgtgg

SEQ ID NO: 17524 - DNA, 15 bp, synthetic construct
  source 1..15: mol_type = other DNA
agttcagctggtcat

SEQ ID NO: 17525 - DNA, 15 bp, synthetic construct
  source 1..15: mol_type = other DNA
ccagcacttctgttt

SEQ ID NO: 17526 - DNA, 15 bp, synthetic construct
  source 1..15: mol_type = other DNA
ggcaggctattgaat

SEQ ID NO: 17527 - DNA, 15 bp, synthetic construct
  source 1..15: mol_type = other DNA
cgccatctcttttct

SEQ ID NO: 17528 - DNA, 15 bp, synthetic construct
  source 1..15: mol_type = other DNA
aaccccaaagtccta

SEQ ID NO: 17529 - DNA, 15 bp, synthetic construct
  source 1..15: mol_type = other DNA
atcacaccatggtcc

SEQ ID NO: 17530 - DNA, 15 bp, synthetic construct
  source 1..15: mol_type = other DNA
ttgccataaatgctc

SEQ ID NO: 17531 - DNA, 15 bp, synthetic construct
  source 1..15: mol_type = other DNA
gtcagtacatcaaaa

SEQ ID NO: 17532 - DNA, 15 bp, synthetic construct
  source 1..15: mol_type = other DNA
tacttcctttctttg

SEQ ID NO: 17533 - DNA, 15 bp, synthetic construct
  source 1..15: mol_type = other DNA
tcagtaggatccttg

SEQ ID NO: 17534 - DNA, 15 bp, synthetic construct
  source 1..15: mol_type = other DNA
atgctgtccaaggag

SEQ ID NO: 17535 - DNA, 15 bp, synthetic construct
  source 1..15: mol_type = other DNA
agtaggagccgtcac

SEQ ID NO: 17536 - DNA, 15 bp, synthetic construct
  source 1..15: mol_type = other DNA
accacttagaaccta

SEQ ID NO: 17537 - DNA, 15 bp, synthetic construct
  source 1..15: mol_type = other DNA
cctaaggcatcatga

SEQ ID NO: 17538 - DNA, 15 bp, synthetic construct
  source 1..15: mol_type = other DNA
tacatgaaagggaac

SEQ ID NO: 17539 - DNA, 15 bp, synthetic construct
  source 1..15: mol_type = other DNA
tggttgttattcacc

SEQ ID NO: 17540 - DNA, 15 bp, synthetic construct
  source 1..15: mol_type = other DNA
gtccacagttctctc

SEQ ID NO: 17541 - DNA, 15 bp, synthetic construct
  source 1..15: mol_type = other DNA
gataacgacgtgtgc

SEQ ID NO: 17542 - DNA, 15 bp, synthetic construct
  source 1..15: mol_type = other DNA
agatacattcctaac

SEQ ID NO: 17543 - DNA, 15 bp, synthetic construct
  source 1..15: mol_type = other DNA
tacccgaagctggtg

SEQ ID NO: 17544 - DNA, 15 bp, synthetic construct
  source 1..15: mol_type = other DNA
ggcttgcatagtaag

SEQ ID NO: 17545 - DNA, 15 bp, synthetic construct
  source 1..15: mol_type = other DNA
tggagggatcgttca

SEQ ID NO: 17546 - DNA, 15 bp, synthetic construct
  source 1..15: mol_type = other DNA
gtggcagagagactg

SEQ ID NO: 17547 - DNA, 15 bp, synthetic construct
  source 1..15: mol_type = other DNA
tatgctttgacaaca

SEQ ID NO: 17548 - DNA, 15 bp, synthetic construct
  source 1..15: mol_type = other DNA
tttgctttgcacttg

SEQ ID NO: 17549 - DNA, 15 bp, synthetic construct
  source 1..15: mol_type = other DNA
aggtcaggtgttatt

SEQ ID NO: 17550 - DNA, 15 bp, synthetic construct
  source 1..15: mol_type = other DNA
ttaaattctgtgcct

SEQ ID NO: 17551 - DNA, 15 bp, synthetic construct
  source 1..15: mol_type = other DNA
gaggcttccctcatg

SEQ ID NO: 17552 - DNA, 15 bp, synthetic construct
  source 1..15: mol_type = other DNA
cccattcctttcagt

SEQ ID NO: 17553 - DNA, 15 bp, synthetic construct
  source 1..15: mol_type = other DNA
cgttggcaccaaact

SEQ ID NO: 17554 - DNA, 15 bp, synthetic construct
  source 1..15: mol_type = other DNA
agacgctgttggatt

SEQ ID NO: 17555 - DNA, 15 bp, synthetic construct
  source 1..15: mol_type = other DNA
gactatagacggatt

SEQ ID NO: 17556 - DNA, 15 bp, synthetic construct
  source 1..15: mol_type = other DNA
gtttgcctttgctca

SEQ ID NO: 17557 - DNA, 15 bp, synthetic construct
  source 1..15: mol_type = other DNA
acacaacatatcccc

SEQ ID NO: 17558 - DNA, 15 bp, synthetic construct
  source 1..15: mol_type = other DNA
ccacaaacgttggtt

SEQ ID NO: 17559 - DNA, 15 bp, synthetic construct
  source 1..15: mol_type = other DNA
tggtgttaggtggag

SEQ ID NO: 17560 - DNA, 15 bp, synthetic construct
  source 1..15: mol_type = other DNA
gttgtagtaagatgt

SEQ ID NO: 17561 - DNA, 15 bp, synthetic construct
  source 1..15: mol_type = other DNA
ccagtctcctctttc

SEQ ID NO: 17562 - DNA, 15 bp, synthetic construct
  source 1..15: mol_type = other DNA
aagtgtgatccacag

SEQ ID NO: 17563 - DNA, 15 bp, synthetic construct
  source 1..15: mol_type = other DNA
gccagactacatgct

SEQ ID NO: 17564 - DNA, 15 bp, synthetic construct
  source 1..15: mol_type = other DNA
ggcgatcgcctataa

SEQ ID NO: 17565 - DNA, 15 bp, synthetic construct
  source 1..15: mol_type = other DNA
ttctgctccaggatg

SEQ ID NO: 17566 - DNA, 15 bp, synthetic construct
  source 1..15: mol_type = other DNA
tcggccatttgtttc

SEQ ID NO: 17567 - DNA, 15 bp, synthetic construct
  source 1..15: mol_type = other DNA
tcccctttttcctac

SEQ ID NO: 17568 - DNA, 15 bp, synthetic construct
  source 1..15: mol_type = other DNA
atgcaaacagaagaa

SEQ ID NO: 17569 - DNA, 15 bp, synthetic construct
  source 1..15: mol_type = other DNA
gccgttcagtttcta

SEQ ID NO: 17570 - DNA, 15 bp, synthetic construct
  source 1..15: mol_type = other DNA
accccttcgaagatg

SEQ ID NO: 17571 - DNA, 15 bp, synthetic construct
  source 1..15: mol_type = other DNA
tgttctcatcaaatg

SEQ ID NO: 17572 - DNA, 15 bp, synthetic construct
  source 1..15: mol_type = other DNA
aagagaaagaaccag

SEQ ID NO: 17573 - DNA, 15 bp, synthetic construct
  source 1..15: mol_type = other DNA
acctggttctttctc

SEQ ID NO: 17574 - DNA, 15 bp, synthetic construct
  source 1..15: mol_type = other DNA
ctcttcttttggatc

SEQ ID NO: 17575 - DNA, 15 bp, synthetic construct
  source 1..15: mol_type = other DNA
gaacagtgctaaggg

SEQ ID NO: 17576 - DNA, 15 bp, synthetic construct
  source 1..15: mol_type = other DNA
gagatctctttgctg

SEQ ID NO: 17577 - DNA, 15 bp, synthetic construct
  source 1..15: mol_type = other DNA
tgaactgtacaaggc

SEQ ID NO: 17578 - DNA, 15 bp, synthetic construct
  source 1..15: mol_type = other DNA
ccacttacagatgcc

SEQ ID NO: 17579 - DNA, 15 bp, synthetic construct
  source 1..15: mol_type = other DNA
gcagggaaacataca

SEQ ID NO: 17580 - DNA, 15 bp, synthetic construct
  source 1..15: mol_type = other DNA
ttctctactcactgg

SEQ ID NO: 17581 - DNA, 15 bp, synthetic construct
  source 1..15: mol_type = other DNA
gcattagagtttcgg

SEQ ID NO: 17582 - DNA, 15 bp, synthetic construct
  source 1..15: mol_type = other DNA
ggttggattcattgc

SEQ ID NO: 17583 - DNA, 15 bp, synthetic construct
  source 1..15: mol_type = other DNA
actttccatggaact

SEQ ID NO: 17584 - DNA, 15 bp, synthetic construct
  source 1..15: mol_type = other DNA
aattatttgtccagt

SEQ ID NO: 17585 - DNA, 15 bp, synthetic construct
  source 1..15: mol_type = other DNA
ttaaagctcagccac

SEQ ID NO: 17586 - DNA, 15 bp, synthetic construct
  source 1..15: mol_type = other DNA
ttgagaaagtctaag

SEQ ID NO: 17587 - DNA, 15 bp, synthetic construct
  source 1..15: mol_type = other DNA
tttgtgtccctgatc

SEQ ID NO: 17588 - DNA, 15 bp, synthetic construct
  source 1..15: mol_type = other DNA
gtttatcagctgtga

SEQ ID NO: 17589 - DNA, 15 bp, synthetic construct
  source 1..15: mol_type = other DNA
gcccaggaataaagc

SEQ ID NO: 17590 - DNA, 15 bp, synthetic construct
  source 1..15: mol_type = other DNA
ttccttgcagaggag

SEQ ID NO: 17591 - DNA, 15 bp, synthetic construct
  source 1..15: mol_type = other DNA
tgcagcttgacatac

SEQ ID NO: 17592 - DNA, 15 bp, synthetic construct
  source 1..15: mol_type = other DNA
attcttgatcctgta

SEQ ID NO: 17593 - DNA, 15 bp, synthetic construct
  source 1..15: mol_type = other DNA
tttcgatttcctaag

SEQ ID NO: 17594 - DNA, 15 bp, synthetic construct
  source 1..15: mol_type = other DNA
tatgacaacgtccct

SEQ ID NO: 17595 - DNA, 15 bp, synthetic construct
  source 1..15: mol_type = other DNA
cggagaggctagaca

SEQ ID NO: 17596 - DNA, 15 bp, synthetic construct
  source 1..15: mol_type = other DNA
gcgagacttggtgat

SEQ ID NO: 17597 - DNA, 15 bp, synthetic construct
  source 1..15: mol_type = other DNA
aggaatacgaagcgg

SEQ ID NO: 17598 - DNA, 15 bp, synthetic construct
  source 1..15: mol_type = other DNA
ttaaagtttcatccc

SEQ ID NO: 17599 - DNA, 15 bp, synthetic construct
  source 1..15: mol_type = other DNA
caggatgttgagtgg

SEQ ID NO: 17600 - DNA, 15 bp, synthetic construct
  source 1..15: mol_type = other DNA
gatccaaagactttc

SEQ ID NO: 17601 - DNA, 15 bp, synthetic construct
  source 1..15: mol_type = other DNA
gggtcgtgtgggaaa

SEQ ID NO: 17602 - DNA, 15 bp, synthetic construct
  source 1..15: mol_type = other DNA
acaagcaggacattc

SEQ ID NO: 17603 - DNA, 15 bp, synthetic construct
  source 1..15: mol_type = other DNA
gggtcgtgtgggaaa

SEQ ID NO: 17604 - DNA, 15 bp, synthetic construct
  source 1..15: mol_type = other DNA
acaagcaggacattc

SEQ ID NO: 17605 - DNA, 15 bp, synthetic construct
  source 1..15: mol_type = other DNA
agacccctccactcc

SEQ ID NO: 17606 - DNA, 15 bp, synthetic construct
  source 1..15: mol_type = other DNA
tggtcctagtcctac

SEQ ID NO: 17607 - DNA, 15 bp, synthetic construct
  source 1..15: mol_type = other DNA
gaccactcagagatg

SEQ ID NO: 17608 - DNA, 15 bp, synthetic construct
  source 1..15: mol_type = other DNA
ggcgttcgtctagat

SEQ ID NO: 17609 - DNA, 15 bp, synthetic construct
  source 1..15: mol_type = other DNA
acgctctcctttcgg

SEQ ID NO: 17610 - DNA, 15 bp, synthetic construct
  source 1..15: mol_type = other DNA
acgtggtaataagag

SEQ ID NO: 17611 - DNA, 15 bp, synthetic construct
  source 1..15: mol_type = other DNA
atcatttgataagaa

SEQ ID NO: 17612 - DNA, 15 bp, synthetic construct
  source 1..15: mol_type = other DNA
gagtaagaatggtct

SEQ ID NO: 17613 - DNA, 15 bp, synthetic construct
  source 1..15: mol_type = other DNA
atagtaatgtgtgct

SEQ ID NO: 17614 - DNA, 15 bp, synthetic construct
  source 1..15: mol_type = other DNA
acatctattgagtct

SEQ ID NO: 17615 - DNA, 15 bp, synthetic construct
  source 1..15: mol_type = other DNA
aactagagccagact

SEQ ID NO: 17616 - DNA, 15 bp, synthetic construct
  source 1..15: mol_type = other DNA
gttccaaattattct

SEQ ID NO: 17617 - DNA, 15 bp, synthetic construct
  source 1..15: mol_type = other DNA
ctctgtttctgtatc

SEQ ID NO: 17618 - DNA, 15 bp, synthetic construct
  source 1..15: mol_type = other DNA
catctaggaaaaagt

SEQ ID NO: 17619 - DNA, 15 bp, synthetic construct
  source 1..15: mol_type = other DNA
agcggaagaaaagaa

SEQ ID NO: 17620 - DNA, 15 bp, synthetic construct
  source 1..15: mol_type = other DNA
tccacttcgcagctc

SEQ ID NO: 17621 - DNA, 15 bp, synthetic construct
  source 1..15: mol_type = other DNA
caggttctctgctct

SEQ ID NO: 17622 - DNA, 15 bp, synthetic construct
  source 1..15: mol_type = other DNA
acacttaccagcatc

SEQ ID NO: 17623 - DNA, 15 bp, synthetic construct
  source 1..15: mol_type = other DNA
ctgtgtcctttgcca

SEQ ID NO: 17624 - DNA, 15 bp, synthetic construct
  source 1..15: mol_type = other DNA
ccgagtgtgctcata

SEQ ID NO: 17625 - DNA, 15 bp, synthetic construct
  source 1..15: mol_type = other DNA
aaccattctttggaa

SEQ ID NO: 17626 - DNA, 15 bp, synthetic construct
  source 1..15: mol_type = other DNA
agtagtcttcacgga

SEQ ID NO: 17627 - DNA, 15 bp, synthetic construct
  source 1..15: mol_type = other DNA
actcctggcagtttc

SEQ ID NO: 17628 - DNA, 15 bp, synthetic construct
  source 1..15: mol_type = other DNA
gcgtccacgtagaag

SEQ ID NO: 17629 - DNA, 15 bp, synthetic construct
  source 1..15: mol_type = other DNA
atgcgtacatctcct

SEQ ID NO: 17630 - DNA, 15 bp, synthetic construct
  source 1..15: mol_type = other DNA
agcaatttctcttct

SEQ ID NO: 17631 - DNA, 15 bp, synthetic construct
  source 1..15: mol_type = other DNA
tgctcttggttacgc

SEQ ID NO: 17632 - DNA, 15 bp, synthetic construct
  source 1..15: mol_type = other DNA
ggcactggtgtgagt

SEQ ID NO: 17633 - DNA, 15 bp, synthetic construct
  source 1..15: mol_type = other DNA
tatcagagactgtgc

SEQ ID NO: 17634 - DNA, 15 bp, synthetic construct
  source 1..15: mol_type = other DNA
ccctcctcttcaacg

SEQ ID NO: 17635 - DNA, 15 bp, synthetic construct
  source 1..15: mol_type = other DNA
agtttcctcatgtcc

SEQ ID NO: 17636 - DNA, 15 bp, synthetic construct
  source 1..15: mol_type = other DNA
agggtttgtcatgtc

SEQ ID NO: 17637 - DNA, 15 bp, synthetic construct
  source 1..15: mol_type = other DNA
agtttcctcatgtcc

SEQ ID NO: 17638 - DNA, 15 bp, synthetic construct
  source 1..15: mol_type = other DNA
agggtttgtcatgtc

SEQ ID NO: 17639 - DNA, 15 bp, synthetic construct
  source 1..15: mol_type = other DNA
ctgggaatctcagcc

SEQ ID NO: 17640 - DNA, 15 bp, synthetic construct
  source 1..15: mol_type = other DNA
cctcccctctcttac

SEQ ID NO: 17641 - DNA, 15 bp, synthetic construct
  source 1..15: mol_type = other DNA
tgggaacatttgtgg

SEQ ID NO: 17642 - DNA, 15 bp, synthetic construct
  source 1..15: mol_type = other DNA
gtcgtccaagaccag

SEQ ID NO: 17643 - DNA, 15 bp, synthetic construct
  source 1..15: mol_type = other DNA
ctatttgtcctcagt

SEQ ID NO: 17644 - DNA, 15 bp, synthetic construct
  source 1..15: mol_type = other DNA
tgtctgcaaaaacat

SEQ ID NO: 17645 - DNA, 15 bp, synthetic construct
  source 1..15: mol_type = other DNA
taggacaagtcctgc

SEQ ID NO: 17646 - DNA, 15 bp, synthetic construct
  source 1..15: mol_type = other DNA
agctccatcctttga

SEQ ID NO: 17647 - DNA, 15 bp, synthetic construct
  source 1..15: mol_type = other DNA
tgaatgtgaacagtc

SEQ ID NO: 17648 - DNA, 15 bp, synthetic construct
  source 1..15: mol_type = other DNA
ccaagagccaagatg

SEQ ID NO: 17649 - DNA, 15 bp, synthetic construct
  source 1..15: mol_type = other DNA
aaaggtgacatcaat

SEQ ID NO: 17650 - DNA, 15 bp, synthetic construct
  source 1..15: mol_type = other DNA
gtactccatcatctc

SEQ ID NO: 17651 - DNA, 15 bp, synthetic construct
  source 1..15: mol_type = other DNA
aaaagtcatgaaggc

SEQ ID NO: 17652 - DNA, 15 bp, synthetic construct
  source 1..15: mol_type = other DNA
tccagccgtctctta

SEQ ID NO: 17653 - DNA, 15 bp, synthetic construct
  source 1..15: mol_type = other DNA
gtctgcttctattcc

SEQ ID NO: 17654 - DNA, 15 bp, synthetic construct
  source 1..15: mol_type = other DNA
cgcgagtcctagcgt

SEQ ID NO: 17655 - DNA, 15 bp, synthetic construct
  source 1..15: mol_type = other DNA
ttgaccatgagtaga

SEQ ID NO: 17656 - DNA, 15 bp, synthetic construct
  source 1..15: mol_type = other DNA
aacggcgcccgttca

SEQ ID NO: 17657 - DNA, 15 bp, synthetic construct
  source 1..15: mol_type = other DNA
ttgaccatgagtaga

SEQ ID NO: 17658 - DNA, 15 bp, synthetic construct
  source 1..15: mol_type = other DNA
aacggcgcccgttca

SEQ ID NO: 17659 - DNA, 15 bp, synthetic construct
  source 1..15: mol_type = other DNA
gccctattcttggac

SEQ ID NO: 17660 - DNA, 15 bp, synthetic construct
  source 1..15: mol_type = other DNA
cggatccgctcgtac

SEQ ID NO: 17661 - DNA, 15 bp, synthetic construct
  source 1..15: mol_type = other DNA
actctaagaaatgag

SEQ ID NO: 17662 - DNA, 15 bp, synthetic construct
  source 1..15: mol_type = other DNA
cctatcccctagcag

SEQ ID NO: 17663 - DNA, 15 bp, synthetic construct
  source 1..15: mol_type = other DNA
gctggtaacctgtcc

SEQ ID NO: 17664 - DNA, 15 bp, synthetic construct
  source 1..15: mol_type = other DNA
ttccatggcgatcat

SEQ ID NO: 17665 - DNA, 15 bp, synthetic construct
  source 1..15: mol_type = other DNA
cattgagtactacga

SEQ ID NO: 17666 - DNA, 15 bp, synthetic construct
  source 1..15: mol_type = other DNA
tccttttatgtatgg

SEQ ID NO: 17667 - DNA, 15 bp, synthetic construct
  source 1..15: mol_type = other DNA
gcctggatcttgatt

SEQ ID NO: 17668 - DNA, 15 bp, synthetic construct
  source 1..15: mol_type = other DNA
gctgctaaggatctt

SEQ ID NO: 17669 - DNA, 15 bp, synthetic construct
  source 1..15: mol_type = other DNA
ccaaaagcgctgtaa

SEQ ID NO: 17670 - DNA, 15 bp, synthetic construct
  source 1..15: mol_type = other DNA
tctagtgccctggag

SEQ ID NO: 17671 - DNA, 15 bp, synthetic construct
  source 1..15: mol_type = other DNA
tgctttgagaagaag

SEQ ID NO: 17672 - DNA, 15 bp, synthetic construct
  source 1..15: mol_type = other DNA
cagttgtcccctgga

SEQ ID NO: 17673 - DNA, 15 bp, synthetic construct
  source 1..15: mol_type = other DNA
tccccaaattctcaa

SEQ ID NO: 17674 - DNA, 15 bp, synthetic construct
  source 1..15: mol_type = other DNA
ccgctcgctgtccct

SEQ ID NO: 17675 - DNA, 15 bp, synthetic construct
  source 1..15: mol_type = other DNA
tgtcaggagggtctt

SEQ ID NO: 17676 - DNA, 15 bp, synthetic construct
  source 1..15: mol_type = other DNA
ctgatgggaatggtg

SEQ ID NO: 17677 - DNA, 15 bp, synthetic construct
  source 1..15: mol_type = other DNA
catcagtttaatagt

SEQ ID NO: 17678 - DNA, 15 bp, synthetic construct
  source 1..15: mol_type = other DNA
ccacaggatgagacg

SEQ ID NO: 17679 - DNA, 15 bp, synthetic construct
  source 1..15: mol_type = other DNA
aacacagaggtggtc

SEQ ID NO: 17680 - DNA, 15 bp, synthetic construct
  source 1..15: mol_type = other DNA
gccctccaggaaacg

SEQ ID NO: 17681 - DNA, 15 bp, synthetic construct
  source 1..15: mol_type = other DNA
aacacagaggtggtc

SEQ ID NO: 17682 - DNA, 15 bp, synthetic construct
  source 1..15: mol_type = other DNA
gccctccaggaaacg

SEQ ID NO: 17683 - DNA, 15 bp, synthetic construct
  source 1..15: mol_type = other DNA
tgcaggcggaggcag

SEQ ID NO: 17684 - DNA, 15 bp, synthetic construct
  source 1..15: mol_type = other DNA
ctagtagacagaagc

SEQ ID NO: 17685 - DNA, 15 bp, synthetic construct
  source 1..15: mol_type = other DNA
tcatatccttttctc

SEQ ID NO: 17686 - DNA, 15 bp, synthetic construct
  source 1..15: mol_type = other DNA
cccaaggtatatgtg

SEQ ID NO: 17687 - DNA, 15 bp, synthetic construct
  source 1..15: mol_type = other DNA
atttaaagacacagc

SEQ ID NO: 17688 - DNA, 15 bp, synthetic construct
  source 1..15: mol_type = other DNA
ggctggagcttaccg

SEQ ID NO: 17689 - DNA, 15 bp, synthetic construct
  source 1..15: mol_type = other DNA
gcgagaactatttgc

SEQ ID NO: 17690 - DNA, 15 bp, synthetic construct
  source 1..15: mol_type = other DNA
tcataaacacctgaa

SEQ ID NO: 17691 - DNA, 15 bp, synthetic construct
  source 1..15: mol_type = other DNA
ttaactccttctggg

SEQ ID NO: 17692 - DNA, 15 bp, synthetic construct
  source 1..15: mol_type = other DNA
taggcaatgatggac

SEQ ID NO: 17693 - DNA, 15 bp, synthetic construct
  source 1..15: mol_type = other DNA
agttggatttggctt

SEQ ID NO: 17694 - DNA, 15 bp, synthetic construct
  source 1..15: mol_type = other DNA
gggtaccaaggagac

SEQ ID NO: 17695 - DNA, 15 bp, synthetic construct
  source 1..15: mol_type = other DNA
cactactaggctctg

SEQ ID NO: 17696 - DNA, 15 bp, synthetic construct
  source 1..15: mol_type = other DNA
gcctcggcgagtatt

SEQ ID NO: 17697 - DNA, 15 bp, synthetic construct
  source 1..15: mol_type = other DNA
cactactaggctctg

SEQ ID NO: 17698 - DNA, 15 bp, synthetic construct
  source 1..15: mol_type = other DNA
gcctcggcgagtatt

SEQ ID NO: 17699 - DNA, 15 bp, synthetic construct
  source 1..15: mol_type = other DNA
cgggtgattgctaca

SEQ ID NO: 17700 - DNA, 15 bp, synthetic construct
  source 1..15: mol_type = other DNA
cagtgaaggcatccc

SEQ ID NO: 17701 - DNA, 15 bp, synthetic construct
  source 1..15: mol_type = other DNA
gagggcatcaagatg

SEQ ID NO: 17702 - DNA, 15 bp, synthetic construct
  source 1..15: mol_type = other DNA
tgccccaagagtaca

SEQ ID NO: 17703 - DNA, 15 bp, synthetic construct
  source 1..15: mol_type = other DNA
gagggcatcaagatg

SEQ ID NO: 17704 - DNA, 15 bp, synthetic construct
  source 1..15: mol_type = other DNA
tgccccaagagtaca

SEQ ID NO: 17705 - DNA, 15 bp, synthetic construct
  source 1..15: mol_type = other DNA
ctggcagagagcgaa

SEQ ID NO: 17706 - DNA, 15 bp, synthetic construct
  source 1..15: mol_type = other DNA
tgatgtggccatctg

SEQ ID NO: 17707 - DNA, 15 bp, synthetic construct
  source 1..15: mol_type = other DNA
ttctggcctaacagg

SEQ ID NO: 17708 - DNA, 15 bp, synthetic construct
  source 1..15: mol_type = other DNA
atgatgacacaatcc

SEQ ID NO: 17709 - DNA, 15 bp, synthetic construct
  source 1..15: mol_type = other DNA
agtggattgtctgag

SEQ ID NO: 17710 - DNA, 15 bp, synthetic construct
  source 1..15: mol_type = other DNA
gaagccaaactaatg

SEQ ID NO: 17711 - DNA, 15 bp, synthetic construct
  source 1..15: mol_type = other DNA
ttgtttagtgctctt

SEQ ID NO: 17712 - DNA, 15 bp, synthetic construct
  source 1..15: mol_type = other DNA
gtacactcaccaaca

SEQ ID NO: 17713 - DNA, 15 bp, synthetic construct
  source 1..15: mol_type = other DNA
gcattacctgtttac

SEQ ID NO: 17714 - DNA, 15 bp, synthetic construct
  source 1..15: mol_type = other DNA
ccactataaccacca

SEQ ID NO: 17715 - DNA, 15 bp, synthetic construct
  source 1..15: mol_type = other DNA
aacttccgagaaagt

SEQ ID NO: 17716 - DNA, 15 bp, synthetic construct
  source 1..15: mol_type = other DNA
ctgtcatcaacagtg

SEQ ID NO: 17717 - DNA, 15 bp, synthetic construct
  source 1..15: mol_type = other DNA
actgtgtgagttctg

SEQ ID NO: 17718 - DNA, 15 bp, synthetic construct
  source 1..15: mol_type = other DNA
gatcttttcctcttg

SEQ ID NO: 17719 - DNA, 15 bp, synthetic construct
  source 1..15: mol_type = other DNA
tactagtcgtgggtg

SEQ ID NO: 17720 - DNA, 15 bp, synthetic construct
  source 1..15: mol_type = other DNA
tcagatctcagtctc

SEQ ID NO: 17721 - DNA, 15 bp, synthetic construct
  source 1..15: mol_type = other DNA
aacttactttgtgca

SEQ ID NO: 17722 - DNA, 15 bp, synthetic construct
  source 1..15: mol_type = other DNA
actagtcatgccaag

SEQ ID NO: 17723 - DNA, 15 bp, synthetic construct
  source 1..15: mol_type = other DNA
gtgtttgttttgcct

SEQ ID NO: 17724 - DNA, 15 bp, synthetic construct
  source 1..15: mol_type = other DNA
taatgttccctactg

SEQ ID NO: 17725 - DNA, 15 bp, synthetic construct
  source 1..15: mol_type = other DNA
aaaacccttaaacca

SEQ ID NO: 17726 - DNA, 15 bp, synthetic construct
  source 1..15: mol_type = other DNA
gtcactgaggtccgt

SEQ ID NO: 17727 - DNA, 15 bp, synthetic construct
  source 1..15: mol_type = other DNA
tggttggagctatag

SEQ ID NO: 17728 - DNA, 15 bp, synthetic construct
  source 1..15: mol_type = other DNA
actcccaaccaagac

SEQ ID NO: 17729 - DNA, 15 bp, synthetic construct
  source 1..15: mol_type = other DNA
tatgctgattctcag

SEQ ID NO: 17730 - DNA, 15 bp, synthetic construct
  source 1..15: mol_type = other DNA
accaggcctacgatc

SEQ ID NO: 17731 - DNA, 15 bp, synthetic construct
  source 1..15: mol_type = other DNA
gcattcctccactaa

SEQ ID NO: 17732 - DNA, 15 bp, synthetic construct
  source 1..15: mol_type = other DNA
aaccagacagtccag

SEQ ID NO: 17733 - DNA, 15 bp, synthetic construct
  source 1..15: mol_type = other DNA
ctctggaaagagaaa

SEQ ID NO: 17734 - DNA, 15 bp, synthetic construct
  source 1..15: mol_type = other DNA
aggttgcaaagctta

SEQ ID NO: 17735 - DNA, 15 bp, synthetic construct
  source 1..15: mol_type = other DNA
gccttgtcgatgaaa

SEQ ID NO: 17736 - DNA, 15 bp, synthetic construct
  source 1..15: mol_type = other DNA
cagcaacacaacatc

SEQ ID NO: 17737 - DNA, 15 bp, synthetic construct
  source 1..15: mol_type = other DNA
cttacgtcggaggat

SEQ ID NO: 17738 - DNA, 15 bp, synthetic construct
  source 1..15: mol_type = other DNA
ctccccagatgtctc

SEQ ID NO: 17739 - DNA, 15 bp, synthetic construct
  source 1..15: mol_type = other DNA
tcgtcccgctaaggg

SEQ ID NO: 17740 - DNA, 15 bp, synthetic construct
  source 1..15: mol_type = other DNA
gacacacctcccatc

SEQ ID NO: 17741 - DNA, 15 bp, synthetic construct
  source 1..15: mol_type = other DNA
gagcatccggtccac

SEQ ID NO: 17742 - DNA, 15 bp, synthetic construct
  source 1..15: mol_type = other DNA
agccggtcttccata

SEQ ID NO: 17743 - DNA, 15 bp, synthetic construct
  source 1..15: mol_type = other DNA
gtcgtcgccgtcctc

SEQ ID NO: 17744 - DNA, 15 bp, synthetic construct
  source 1..15: mol_type = other DNA
cttggaaaatggtgt

SEQ ID NO: 17745 - DNA, 15 bp, synthetic construct
  source 1..15: mol_type = other DNA
tcttgctggagcgac

SEQ ID NO: 17746 - DNA, 15 bp, synthetic construct
  source 1..15: mol_type = other DNA
taatttgcatatctt

SEQ ID NO: 17747 - DNA, 15 bp, synthetic construct
  source 1..15: mol_type = other DNA
attttctacccttcg

SEQ ID NO: 17748 - DNA, 15 bp, synthetic construct
  source 1..15: mol_type = other DNA
agtcgactgagctac

SEQ ID NO: 17749 - DNA, 15 bp, synthetic construct
  source 1..15: mol_type = other DNA
tccgggaaggctgag

SEQ ID NO: 17750 - DNA, 15 bp, synthetic construct
  source 1..15: mol_type = other DNA
gacgcgcggagtctt

SEQ ID NO: 17751 - DNA, 15 bp, synthetic construct
  source 1..15: mol_type = other DNA
tagctccaaagaacc

SEQ ID NO: 17752 - DNA, 15 bp, synthetic construct
  source 1..15: mol_type = other DNA
gtcttgaaggagcca

SEQ ID NO: 17753 - DNA, 15 bp, synthetic construct
  source 1..15: mol_type = other DNA
cgatacctcaagttt

SEQ ID NO: 17754 - DNA, 15 bp, synthetic construct
  source 1..15: mol_type = other DNA
tctatagacatttga

SEQ ID NO: 17755 - DNA, 15 bp, synthetic construct
  source 1..15: mol_type = other DNA
gtaatcccattaacc

SEQ ID NO: 17756 - DNA, 15 bp, synthetic construct
  source 1..15: mol_type = other DNA
acttccacgaatcat

SEQ ID NO: 17757 - DNA, 15 bp, synthetic construct
  source 1..15: mol_type = other DNA
actgtctagagctga

SEQ ID NO: 17758 - DNA, 15 bp, synthetic construct
  source 1..15: mol_type = other DNA
tagagagtttgagga

SEQ ID NO: 17759 - DNA, 15 bp, synthetic construct
  source 1..15: mol_type = other DNA
ggctaggagaatgct

SEQ ID NO: 17760 - DNA, 15 bp, synthetic construct
  source 1..15: mol_type = other DNA
gtcgcacttgagatc

SEQ ID NO: 17761 - DNA, 15 bp, synthetic construct
  source 1..15: mol_type = other DNA
tacactcccgggttc

SEQ ID NO: 17762 - DNA, 15 bp, synthetic construct
  source 1..15: mol_type = other DNA
ggtagttttgtggac

SEQ ID NO: 17763 - DNA, 15 bp, synthetic construct
  source 1..15: mol_type = other DNA
gtccacaaaactacc

SEQ ID NO: 17764 - DNA, 15 bp, synthetic construct
  source 1..15: mol_type = other DNA
tgccgaacgcgtaca

SEQ ID NO: 17765 - DNA, 15 bp, synthetic construct
  source 1..15: mol_type = other DNA
tacgaggaaaagtac

SEQ ID NO: 17766 - DNA, 15 bp, synthetic construct
  source 1..15: mol_type = other DNA
tctagcctgttttcg

SEQ ID NO: 17767 - DNA, 15 bp, synthetic construct
  source 1..15: mol_type = other DNA
catcttccagtagca

SEQ ID NO: 17768 - DNA, 15 bp, synthetic construct
  source 1..15: mol_type = other DNA
ctcgttcttatccgt

SEQ ID NO: 17769 - DNA, 15 bp, synthetic construct
  source 1..15: mol_type = other DNA
cttccacaaggtgaa

SEQ ID NO: 17770 - DNA, 15 bp, synthetic construct
  source 1..15: mol_type = other DNA
cctccgctagttcca

SEQ ID NO: 17771 - DNA, 15 bp, synthetic construct
  source 1..15: mol_type = other DNA
cttccacaaggtgaa

SEQ ID NO: 17772 - DNA, 15 bp, synthetic construct
  source 1..15: mol_type = other DNA
cctccgctagttcca

SEQ ID NO: 17773 - DNA, 15 bp, synthetic construct
  source 1..15: mol_type = other DNA
ggttcaccatccagg

SEQ ID NO: 17774 - DNA, 15 bp, synthetic construct
  source 1..15: mol_type = other DNA
ctttacacgtccagt

SEQ ID NO: 17775 - DNA, 15 bp, synthetic construct
  source 1..15: mol_type = other DNA
aggagctgccagtta

SEQ ID NO: 17776 - DNA, 15 bp, synthetic construct
  source 1..15: mol_type = other DNA
ttcccttgctttacg

SEQ ID NO: 17777 - DNA, 15 bp, synthetic construct
  source 1..15: mol_type = other DNA
acgtgaacgggttgc

SEQ ID NO: 17778 - DNA, 15 bp, synthetic construct
  source 1..15: mol_type = other DNA
ctacgtctcaagatc

SEQ ID NO: 17779 - DNA, 15 bp, synthetic construct
  source 1..15: mol_type = other DNA
actattcccttttat

SEQ ID NO: 17780 - DNA, 15 bp, synthetic construct
  source 1..15: mol_type = other DNA
atgagattgggtttc

SEQ ID NO: 17781 - DNA, 15 bp, synthetic construct
  source 1..15: mol_type = other DNA
tccctaatatcctcc

SEQ ID NO: 17782 - DNA, 15 bp, synthetic construct
  source 1..15: mol_type = other DNA
tgttaaagagaaagg

SEQ ID NO: 17783 - DNA, 15 bp, synthetic construct
  source 1..15: mol_type = other DNA
tgttctggtacaagt

SEQ ID NO: 17784 - DNA, 15 bp, synthetic construct
  source 1..15: mol_type = other DNA
taggttactctctat

SEQ ID NO: 17785 - DNA, 15 bp, synthetic construct
  source 1..15: mol_type = other DNA
agtccattgtggctg

SEQ ID NO: 17786 - DNA, 15 bp, synthetic construct
  source 1..15: mol_type = other DNA
gatccaaacactctg

SEQ ID NO: 17787 - DNA, 15 bp, synthetic construct
  source 1..15: mol_type = other DNA
gagataacaagctct

SEQ ID NO: 17788 - DNA, 15 bp, synthetic construct
  source 1..15: mol_type = other DNA
agagagtaataaacc

SEQ ID NO: 17789 - DNA, 15 bp, synthetic construct
  source 1..15: mol_type = other DNA
cctataggttcatgg

SEQ ID NO: 17790 - DNA, 15 bp, synthetic construct
  source 1..15: mol_type = other DNA
ggagggtatgttgag

SEQ ID NO: 17791 - DNA, 15 bp, synthetic construct
  source 1..15: mol_type = other DNA
gtggtctcaacatac

SEQ ID NO: 17792 - DNA, 15 bp, synthetic construct
  source 1..15: mol_type = other DNA
gggatttgaggagac

SEQ ID NO: 17793 - DNA, 15 bp, synthetic construct
  source 1..15: mol_type = other DNA
ggaaacccattttcc

SEQ ID NO: 17794 - DNA, 15 bp, synthetic construct
  source 1..15: mol_type = other DNA
cctgagaacaagtgg

SEQ ID NO: 17795 - DNA, 15 bp, synthetic construct
  source 1..15: mol_type = other DNA
acttccattctcctc

SEQ ID NO: 17796 - DNA, 15 bp, synthetic construct
  source 1..15: mol_type = other DNA
cacagccagtgagaa

SEQ ID NO: 17797 - DNA, 15 bp, synthetic construct
  source 1..15: mol_type = other DNA
ctttctctggctagt

SEQ ID NO: 17798 - DNA, 15 bp, synthetic construct
  source 1..15: mol_type = other DNA
agggaagagtgcaga

SEQ ID NO: 17799 - DNA, 15 bp, synthetic construct
  source 1..15: mol_type = other DNA
gtgagtagaaaacca

SEQ ID NO: 17800 - DNA, 15 bp, synthetic construct
  source 1..15: mol_type = other DNA
cagtgagtagggata

SEQ ID NO: 17801 - DNA, 15 bp, synthetic construct
  source 1..15: mol_type = other DNA
ctcactgtctgtcct

SEQ ID NO: 17802 - DNA, 15 bp, synthetic construct
  source 1..15: mol_type = other DNA
tctgagctctctgaa

SEQ ID NO: 17803 - DNA, 15 bp, synthetic construct
  source 1..15: mol_type = other DNA
ccaaaaccttcaacc

SEQ ID NO: 17804 - DNA, 15 bp, synthetic construct
  source 1..15: mol_type = other DNA
cacaggctgctgtag

SEQ ID NO: 17805 - DNA, 15 bp, synthetic construct
  source 1..15: mol_type = other DNA
tgtggatgaactact

SEQ ID NO: 17806 - DNA, 15 bp, synthetic construct
  source 1..15: mol_type = other DNA
tcttcaatttctttt

SEQ ID NO: 17807 - DNA, 15 bp, synthetic construct
  source 1..15: mol_type = other DNA
tgtggatgaactact

SEQ ID NO: 17808 - DNA, 15 bp, synthetic construct
  source 1..15: mol_type = other DNA
tcttcaatttctttt

SEQ ID NO: 17809 - DNA, 15 bp, synthetic construct
  source 1..15: mol_type = other DNA
aggtggaaacactac

SEQ ID NO: 17810 - DNA, 15 bp, synthetic construct
  source 1..15: mol_type = other DNA
aaaacagtcgacaga

SEQ ID NO: 17811 - DNA, 15 bp, synthetic construct
  source 1..15: mol_type = other DNA
cttagtgctctcctt

SEQ ID NO: 17812 - DNA, 15 bp, synthetic construct
  source 1..15: mol_type = other DNA
gtgatgaagaaacct

SEQ ID NO: 17813 - DNA, 15 bp, synthetic construct
  source 1..15: mol_type = other DNA
tttcttcatcacttt

SEQ ID NO: 17814 - DNA, 15 bp, synthetic construct
  source 1..15: mol_type = other DNA
ggcagcagaactaac

SEQ ID NO: 17815 - DNA, 15 bp, synthetic construct
  source 1..15: mol_type = other DNA
ttgatcaatacattt

SEQ ID NO: 17816 - DNA, 15 bp, synthetic construct
  source 1..15: mol_type = other DNA
ttcacctggaggtaa

SEQ ID NO: 17817 - DNA, 15 bp, synthetic construct
  source 1..15: mol_type = other DNA
aatgttctccatgac

SEQ ID NO: 17818 - DNA, 15 bp, synthetic construct
  source 1..15: mol_type = other DNA
ctgatctcctctcta

SEQ ID NO: 17819 - DNA, 15 bp, synthetic construct
  source 1..15: mol_type = other DNA
aggctacactcttct

SEQ ID NO: 17820 - DNA, 15 bp, synthetic construct
  source 1..15: mol_type = other DNA
atccataacaggtaa

SEQ ID NO: 17821 - DNA, 15 bp, synthetic construct
  source 1..15: mol_type = other DNA
ggatggtaagatggg

SEQ ID NO: 17822 - DNA, 15 bp, synthetic construct
  source 1..15: mol_type = other DNA
tggaaagagtagatg

SEQ ID NO: 17823 - DNA, 15 bp, synthetic construct
  source 1..15: mol_type = other DNA
gcaggtgtatactac

SEQ ID NO: 17824 - DNA, 15 bp, synthetic construct
  source 1..15: mol_type = other DNA
ctgactctgaggttt

SEQ ID NO: 17825 - DNA, 15 bp, synthetic construct
  source 1..15: mol_type = other DNA
gtgttctgttatggt

SEQ ID NO: 17826 - DNA, 15 bp, synthetic construct
  source 1..15: mol_type = other DNA
gattacacacaggat

SEQ ID NO: 17827 - DNA, 15 bp, synthetic construct
  source 1..15: mol_type = other DNA
tttaattccacagtc

SEQ ID NO: 17828 - DNA, 15 bp, synthetic construct
  source 1..15: mol_type = other DNA
gagcagcagataaaa

SEQ ID NO: 17829 - DNA, 15 bp, synthetic construct
  source 1..15: mol_type = other DNA
tcttcctgttcagct

SEQ ID NO: 17830 - DNA, 15 bp, synthetic construct
  source 1..15: mol_type = other DNA
gagctgaggcggaat

SEQ ID NO: 17831 - DNA, 15 bp, synthetic construct
  source 1..15: mol_type = other DNA
ggtccacattgacac

SEQ ID NO: 17832 - DNA, 15 bp, synthetic construct
  source 1..15: mol_type = other DNA
gtagaagaccagctc

SEQ ID NO: 17833 - DNA, 15 bp, synthetic construct
  source 1..15: mol_type = other DNA
ttgactccttgaaac

SEQ ID NO: 17834 - DNA, 15 bp, synthetic construct
  source 1..15: mol_type = other DNA
gctccaaataccagt

SEQ ID NO: 17835 - DNA, 15 bp, synthetic construct
  source 1..15: mol_type = other DNA
tttccttggaaggtg

SEQ ID NO: 17836 - DNA, 15 bp, synthetic construct
  source 1..15: mol_type = other DNA
cagaggtgcctttcg

SEQ ID NO: 17837 - DNA, 15 bp, synthetic construct
  source 1..15: mol_type = other DNA
cagactttacccatg

SEQ ID NO: 17838 - DNA, 15 bp, synthetic construct
  source 1..15: mol_type = other DNA
ggcgcatgcacttat

SEQ ID NO: 17839 - DNA, 15 bp, synthetic construct
  source 1..15: mol_type = other DNA
ctggatgcccgtgaa

SEQ ID NO: 17840 - DNA, 15 bp, synthetic construct
  source 1..15: mol_type = other DNA
tggcatcttcctcta

SEQ ID NO: 17841 - DNA, 15 bp, synthetic construct
  source 1..15: mol_type = other DNA
ctggatgcccgtgaa

SEQ ID NO: 17842 - DNA, 15 bp, synthetic construct
  source 1..15: mol_type = other DNA
tggcatcttcctcta

SEQ ID NO: 17843 - DNA, 15 bp, synthetic construct
  source 1..15: mol_type = other DNA
tggcttgaacagaag

SEQ ID NO: 17844 - DNA, 15 bp, synthetic construct
  source 1..15: mol_type = other DNA
cccagccccagatag

SEQ ID NO: 17845 - DNA, 15 bp, synthetic construct
  source 1..15: mol_type = other DNA
caggatcccctcgtg

SEQ ID NO: 17846 - DNA, 15 bp, synthetic construct
  source 1..15: mol_type = other DNA
ggaggtcaaagagca

SEQ ID NO: 17847 - DNA, 15 bp, synthetic construct
  source 1..15: mol_type = other DNA
cactcacccacaagc

SEQ ID NO: 17848 - DNA, 15 bp, synthetic construct
  source 1..15: mol_type = other DNA
tcagcaaacctgagc

SEQ ID NO: 17849 - DNA, 15 bp, synthetic construct
  source 1..15: mol_type = other DNA
gcctactaccagcag

SEQ ID NO: 17850 - DNA, 15 bp, synthetic construct
  source 1..15: mol_type = other DNA
tctgctcttaagagt

SEQ ID NO: 17851 - DNA, 15 bp, synthetic construct
  source 1..15: mol_type = other DNA
ggtcccacaaaacct

SEQ ID NO: 17852 - DNA, 15 bp, synthetic construct
  source 1..15: mol_type = other DNA
ccatctggatgatgt

SEQ ID NO: 17853 - DNA, 15 bp, synthetic construct
  source 1..15: mol_type = other DNA
agactccaggaatat

SEQ ID NO: 17854 - DNA, 15 bp, synthetic construct
  source 1..15: mol_type = other DNA
attcttacctgctac

SEQ ID NO: 17855 - DNA, 15 bp, synthetic construct
  source 1..15: mol_type = other DNA
agcacatgggactcc

SEQ ID NO: 17856 - DNA, 15 bp, synthetic construct
  source 1..15: mol_type = other DNA
ctccatcctgatcat

SEQ ID NO: 17857 - DNA, 15 bp, synthetic construct
  source 1..15: mol_type = other DNA
aaatccaccaggacc

SEQ ID NO: 17858 - DNA, 15 bp, synthetic construct
  source 1..15: mol_type = other DNA
tagatgctgatggat

SEQ ID NO: 17859 - DNA, 15 bp, synthetic construct
  source 1..15: mol_type = other DNA
aagggaagctaaggg

SEQ ID NO: 17860 - DNA, 15 bp, synthetic construct
  source 1..15: mol_type = other DNA
ctacagaagacttat

SEQ ID NO: 17861 - DNA, 15 bp, synthetic construct
  source 1..15: mol_type = other DNA
gctgttcttgaactt

SEQ ID NO: 17862 - DNA, 15 bp, synthetic construct
  source 1..15: mol_type = other DNA
aatggatagtagtgc

SEQ ID NO: 17863 - DNA, 15 bp, synthetic construct
  source 1..15: mol_type = other DNA
gtcttatacacaacc

SEQ ID NO: 17864 - DNA, 15 bp, synthetic construct
  source 1..15: mol_type = other DNA
ggtctagagtacatc

SEQ ID NO: 17865 - DNA, 15 bp, synthetic construct
  source 1..15: mol_type = other DNA
tagcgggagatgaag

SEQ ID NO: 17866 - DNA, 15 bp, synthetic construct
  source 1..15: mol_type = other DNA
gtagttctgtccttg

SEQ ID NO: 17867 - DNA, 15 bp, synthetic construct
  source 1..15: mol_type = other DNA
gccggtcagtcaaag

SEQ ID NO: 17868 - DNA, 15 bp, synthetic construct
  source 1..15: mol_type = other DNA
cccacaggagaaaag

SEQ ID NO: 17869 - DNA, 15 bp, synthetic construct
  source 1..15: mol_type = other DNA
cttcctcaaacacca

SEQ ID NO: 17870 - DNA, 15 bp, synthetic construct
  source 1..15: mol_type = other DNA
cctgaccttgatccc

SEQ ID NO: 17871 - DNA, 15 bp, synthetic construct
  source 1..15: mol_type = other DNA
agacaggtattggca

SEQ ID NO: 17872 - DNA, 15 bp, synthetic construct
  source 1..15: mol_type = other DNA
ctgaccatgctctta

SEQ ID NO: 17873 - DNA, 15 bp, synthetic construct
  source 1..15: mol_type = other DNA
agacagaggctacgc

SEQ ID NO: 17874 - DNA, 15 bp, synthetic construct
  source 1..15: mol_type = other DNA
ttcgaaggcgctatc

SEQ ID NO: 17875 - DNA, 15 bp, synthetic construct
  source 1..15: mol_type = other DNA
gcccttgtagaagct

SEQ ID NO: 17876 - DNA, 15 bp, synthetic construct
  source 1..15: mol_type = other DNA
tgttccgcatagatg

SEQ ID NO: 17877 - DNA, 15 bp, synthetic construct
  source 1..15: mol_type = other DNA
ccctctagggagtgc

SEQ ID NO: 17878 - DNA, 15 bp, synthetic construct
  source 1..15: mol_type = other DNA
tccccagagctcttt

SEQ ID NO: 17879 - DNA, 15 bp, synthetic construct
  source 1..15: mol_type = other DNA
cagctggattaggct

SEQ ID NO: 17880 - DNA, 15 bp, synthetic construct
  source 1..15: mol_type = other DNA
cgcttcctctttgtg

SEQ ID NO: 17881 - DNA, 15 bp, synthetic construct
  source 1..15: mol_type = other DNA
tctctgacatgaggg

SEQ ID NO: 17882 - DNA, 15 bp, synthetic construct
  source 1..15: mol_type = other DNA
tgatcttctcatccc

SEQ ID NO: 17883 - DNA, 15 bp, synthetic construct
  source 1..15: mol_type = other DNA
tagagatgcctgttc

SEQ ID NO: 17884 - DNA, 15 bp, synthetic construct
  source 1..15: mol_type = other DNA
tgggaagcgagaatg

SEQ ID NO: 17885 - DNA, 15 bp, synthetic construct
  source 1..15: mol_type = other DNA
aagctctctccttgc

SEQ ID NO: 17886 - DNA, 15 bp, synthetic construct
  source 1..15: mol_type = other DNA
tgttcgcccttgatc

SEQ ID NO: 17887 - DNA, 15 bp, synthetic construct
  source 1..15: mol_type = other DNA
atgggagccatagtg

SEQ ID NO: 17888 - DNA, 15 bp, synthetic construct
  source 1..15: mol_type = other DNA
actgctagacaggtt

SEQ ID NO: 17889 - DNA, 15 bp, synthetic construct
  source 1..15: mol_type = other DNA
ggtcttcaaagataa

SEQ ID NO: 17890 - DNA, 15 bp, synthetic construct
  source 1..15: mol_type = other DNA
agagctgcgtagagt

SEQ ID NO: 17891 - DNA, 15 bp, synthetic construct
  source 1..15: mol_type = other DNA
ggtcttcaaagataa

SEQ ID NO: 17892 - DNA, 15 bp, synthetic construct
  source 1..15: mol_type = other DNA
agagctgcgtagagt

SEQ ID NO: 17893 - DNA, 15 bp, synthetic construct
  source 1..15: mol_type = other DNA
acaatcctcatctgc

SEQ ID NO: 17894 - DNA, 15 bp, synthetic construct
  source 1..15: mol_type = other DNA
ctaactcaggcgcat

SEQ ID NO: 17895 - DNA, 15 bp, synthetic construct
  source 1..15: mol_type = other DNA
cactcctctatctgc

SEQ ID NO: 17896 - DNA, 15 bp, synthetic construct
  source 1..15: mol_type = other DNA
ctaaccgacctctgg

SEQ ID NO: 17897 - DNA, 15 bp, synthetic construct
  source 1..15: mol_type = other DNA
ttcaaacaaagctct

SEQ ID NO: 17898 - DNA, 15 bp, synthetic construct
  source 1..15: mol_type = other DNA
attatgaagacatga

SEQ ID NO: 17899 - DNA, 15 bp, synthetic construct
  source 1..15: mol_type = other DNA
tcatattcctcctgc

SEQ ID NO: 17900 - DNA, 15 bp, synthetic construct
  source 1..15: mol_type = other DNA
tcaccgtagacaact

SEQ ID NO: 17901 - DNA, 15 bp, synthetic construct
  source 1..15: mol_type = other DNA
tcatattcctcctgc

SEQ ID NO: 17902 - DNA, 15 bp, synthetic construct
  source 1..15: mol_type = other DNA
tcaccgtagacaact

SEQ ID NO: 17903 - DNA, 15 bp, synthetic construct
  source 1..15: mol_type = other DNA
agctattgggaagtg

SEQ ID NO: 17904 - DNA, 15 bp, synthetic construct
  source 1..15: mol_type = other DNA
cttcagcagattctc

SEQ ID NO: 17905 - DNA, 15 bp, synthetic construct
  source 1..15: mol_type = other DNA
cgatcagcgctacgg

SEQ ID NO: 17906 - DNA, 15 bp, synthetic construct
  source 1..15: mol_type = other DNA
ttcactaccaggaat

SEQ ID NO: 17907 - DNA, 15 bp, synthetic construct
  source 1..15: mol_type = other DNA
cttcaacctggatac

SEQ ID NO: 17908 - DNA, 15 bp, synthetic construct
  source 1..15: mol_type = other DNA
tccagcttcacttac

SEQ ID NO: 17909 - DNA, 15 bp, synthetic construct
  source 1..15: mol_type = other DNA
tcttcggctactcgg

SEQ ID NO: 17910 - DNA, 15 bp, synthetic construct
  source 1..15: mol_type = other DNA
gcacttgccaatgat

SEQ ID NO: 17911 - DNA, 15 bp, synthetic construct
  source 1..15: mol_type = other DNA
aatctgtaaatgtat

SEQ ID NO: 17912 - DNA, 15 bp, synthetic construct
  source 1..15: mol_type = other DNA
cttttcactgtgatg

SEQ ID NO: 17913 - DNA, 15 bp, synthetic construct
  source 1..15: mol_type = other DNA
gactgtgagcggatg

SEQ ID NO: 17914 - DNA, 15 bp, synthetic construct
  source 1..15: mol_type = other DNA
gctcgtcattattct

SEQ ID NO: 17915 - DNA, 15 bp, synthetic construct
  source 1..15: mol_type = other DNA
tagagctcagaataa

SEQ ID NO: 17916 - DNA, 15 bp, synthetic construct
  source 1..15: mol_type = other DNA
acccacttaccagaa

SEQ ID NO: 17917 - DNA, 15 bp, synthetic construct
  source 1..15: mol_type = other DNA
cattattgaggacat

SEQ ID NO: 17918 - DNA, 15 bp, synthetic construct
  source 1..15: mol_type = other DNA
agagcacaggatact

SEQ ID NO: 17919 - DNA, 15 bp, synthetic construct
  source 1..15: mol_type = other DNA
gagatctcctttgac

SEQ ID NO: 17920 - DNA, 15 bp, synthetic construct
  source 1..15: mol_type = other DNA
tattgcacatctcgt

SEQ ID NO: 17921 - DNA, 15 bp, synthetic construct
  source 1..15: mol_type = other DNA
actccagtgatgact

SEQ ID NO: 17922 - DNA, 15 bp, synthetic construct
  source 1..15: mol_type = other DNA
tcctgtttctagtgt

SEQ ID NO: 17923 - DNA, 15 bp, synthetic construct
  source 1..15: mol_type = other DNA
ggtggtgacttatac

SEQ ID NO: 17924 - DNA, 15 bp, synthetic construct
  source 1..15: mol_type = other DNA
tagtcacaactgcac

SEQ ID NO: 17925 - DNA, 15 bp, synthetic construct
  source 1..15: mol_type = other DNA
gaagttgactgggac

SEQ ID NO: 17926 - DNA, 15 bp, synthetic construct
  source 1..15: mol_type = other DNA
tcacccatcattgtt

SEQ ID NO: 17927 - DNA, 15 bp, synthetic construct
  source 1..15: mol_type = other DNA
ggcgcggtgttcttg

SEQ ID NO: 17928 - DNA, 15 bp, synthetic construct
  source 1..15: mol_type = other DNA
tgactgcaaacctct

SEQ ID NO: 17929 - DNA, 15 bp, synthetic construct
  source 1..15: mol_type = other DNA
cctgtcaaacaagaa

SEQ ID NO: 17930 - DNA, 15 bp, synthetic construct
  source 1..15: mol_type = other DNA
ctggttgatgtcacc

SEQ ID NO: 17931 - DNA, 15 bp, synthetic construct
  source 1..15: mol_type = other DNA
cactccttcttcatg

SEQ ID NO: 17932 - DNA, 15 bp, synthetic construct
  source 1..15: mol_type = other DNA
atcctctctctagta

SEQ ID NO: 17933 - DNA, 15 bp, synthetic construct
  source 1..15: mol_type = other DNA
ggccaagatcagttc

SEQ ID NO: 17934 - DNA, 15 bp, synthetic construct
  source 1..15: mol_type = other DNA
tagagctactgtgat

SEQ ID NO: 17935 - DNA, 15 bp, synthetic construct
  source 1..15: mol_type = other DNA
ttgggcaaagtgtac

SEQ ID NO: 17936 - DNA, 15 bp, synthetic construct
  source 1..15: mol_type = other DNA
ggaatagccgaaggt

SEQ ID NO: 17937 - DNA, 15 bp, synthetic construct
  source 1..15: mol_type = other DNA
ttgggcaaagtgtac

SEQ ID NO: 17938 - DNA, 15 bp, synthetic construct
  source 1..15: mol_type = other DNA
ggaatagccgaaggt

SEQ ID NO: 17939 - DNA, 15 bp, synthetic construct
  source 1..15: mol_type = other DNA
taatccatggagaga

SEQ ID NO: 17940 - DNA, 15 bp, synthetic construct
  source 1..15: mol_type = other DNA
acacagatgggaatc

SEQ ID NO: 17941 - DNA, 15 bp, synthetic construct
  source 1..15: mol_type = other DNA
gtctgcacagattcc

SEQ ID NO: 17942 - DNA, 15 bp, synthetic construct
  source 1..15: mol_type = other DNA
cctccctataaataa

SEQ ID NO: 17943 - DNA, 15 bp, synthetic construct
  source 1..15: mol_type = other DNA
ctttggctttaaggg

SEQ ID NO: 17944 - DNA, 15 bp, synthetic construct
  source 1..15: mol_type = other DNA
gtttcgcctgtagtt

SEQ ID NO: 17945 - DNA, 15 bp, synthetic construct
  source 1..15: mol_type = other DNA
ctgtgctttgcttac

SEQ ID NO: 17946 - DNA, 15 bp, synthetic construct
  source 1..15: mol_type = other DNA
tggcagcgcatctcg

SEQ ID NO: 17947 - DNA, 15 bp, synthetic construct
  source 1..15: mol_type = other DNA
ctgtgctttgcttac

SEQ ID NO: 17948 - DNA, 15 bp, synthetic construct
  source 1..15: mol_type = other DNA
tggcagcgcatctcg

SEQ ID NO: 17949 - DNA, 15 bp, synthetic construct
  source 1..15: mol_type = other DNA
accaccctgtctacc

SEQ ID NO: 17950 - DNA, 15 bp, synthetic construct
  source 1..15: mol_type = other DNA
ctcacccttgatcta

SEQ ID NO: 17951 - DNA, 15 bp, synthetic construct
  source 1..15: mol_type = other DNA
actgtcaggttttca

SEQ ID NO: 17952 - DNA, 15 bp, synthetic construct
  source 1..15: mol_type = other DNA
tgaggatcgggtagg

SEQ ID NO: 17953 - DNA, 15 bp, synthetic construct
  source 1..15: mol_type = other DNA
tctttacctttgcgg

SEQ ID NO: 17954 - DNA, 15 bp, synthetic construct
  source 1..15: mol_type = other DNA
gctctcacacttgtt

SEQ ID NO: 17955 - DNA, 15 bp, synthetic construct
  source 1..15: mol_type = other DNA
tctttacctttgcgg

SEQ ID NO: 17956 - DNA, 15 bp, synthetic construct
  source 1..15: mol_type = other DNA
gctctcacacttgtt

SEQ ID NO: 17957 - DNA, 15 bp, synthetic construct
  source 1..15: mol_type = other DNA
actgaggtgagtggg

SEQ ID NO: 17958 - DNA, 15 bp, synthetic construct
  source 1..15: mol_type = other DNA
cttggccgattaacg

SEQ ID NO: 17959 - DNA, 15 bp, synthetic construct
  source 1..15: mol_type = other DNA
gatggtcagaaacgg

SEQ ID NO: 17960 - DNA, 15 bp, synthetic construct
  source 1..15: mol_type = other DNA
gtccgggtgttcgtc

SEQ ID NO: 17961 - DNA, 15 bp, synthetic construct
  source 1..15: mol_type = other DNA
acgtccggaaattgc

SEQ ID NO: 17962 - DNA, 15 bp, synthetic construct
  source 1..15: mol_type = other DNA
acaggacatggatat

SEQ ID NO: 17963 - DNA, 15 bp, synthetic construct
  source 1..15: mol_type = other DNA
cttattcgccttctt

SEQ ID NO: 17964 - DNA, 15 bp, synthetic construct
  source 1..15: mol_type = other DNA
gtttctgggcctctt

SEQ ID NO: 17965 - DNA, 15 bp, synthetic construct
  source 1..15: mol_type = other DNA
ccaactagaatagtg

SEQ ID NO: 17966 - DNA, 15 bp, synthetic construct
  source 1..15: mol_type = other DNA
ggtgatccaagatac

SEQ ID NO: 17967 - DNA, 15 bp, synthetic construct
  source 1..15: mol_type = other DNA
tggatcaccttccta

SEQ ID NO: 17968 - DNA, 15 bp, synthetic construct
  source 1..15: mol_type = other DNA
ggatgatccagggaa

SEQ ID NO: 17969 - DNA, 15 bp, synthetic construct
  source 1..15: mol_type = other DNA
gcttgcttgagtcca

SEQ ID NO: 17970 - DNA, 15 bp, synthetic construct
  source 1..15: mol_type = other DNA
cctccacagttttca

SEQ ID NO: 17971 - DNA, 15 bp, synthetic construct
  source 1..15: mol_type = other DNA
aaatcaccggctaca

SEQ ID NO: 17972 - DNA, 15 bp, synthetic construct
  source 1..15: mol_type = other DNA
aagatgtgtcatagt

SEQ ID NO: 17973 - DNA, 15 bp, synthetic construct
  source 1..15: mol_type = other DNA
caggagataatgact

SEQ ID NO: 17974 - DNA, 15 bp, synthetic construct
  source 1..15: mol_type = other DNA
aaatgaaatatccct

SEQ ID NO: 17975 - DNA, 15 bp, synthetic construct
  source 1..15: mol_type = other DNA
gcaaatctcctattt

SEQ ID NO: 17976 - DNA, 15 bp, synthetic construct
  source 1..15: mol_type = other DNA
acctcatcacactga

SEQ ID NO: 17977 - DNA, 15 bp, synthetic construct
  source 1..15: mol_type = other DNA
aatctggagactcag

SEQ ID NO: 17978 - DNA, 15 bp, synthetic construct
  source 1..15: mol_type = other DNA
aggagagaccttcag

SEQ ID NO: 17979 - DNA, 15 bp, synthetic construct
  source 1..15: mol_type = other DNA
aagtgtcaagtgttc

SEQ ID NO: 17980 - DNA, 15 bp, synthetic construct
  source 1..15: mol_type = other DNA
gaaccatatggctga

SEQ ID NO: 17981 - DNA, 15 bp, synthetic construct
  source 1..15: mol_type = other DNA
taggaagggtgagga

SEQ ID NO: 17982 - DNA, 15 bp, synthetic construct
  source 1..15: mol_type = other DNA
cgtgggttggaggaa

SEQ ID NO: 17983 - DNA, 15 bp, synthetic construct
  source 1..15: mol_type = other DNA
gccctggtccacgag

SEQ ID NO: 17984 - DNA, 15 bp, synthetic construct
  source 1..15: mol_type = other DNA
tcagtagtcgtcggt

SEQ ID NO: 17985 - DNA, 15 bp, synthetic construct
  source 1..15: mol_type = other DNA
aagaggcagaaggcg

SEQ ID NO: 17986 - DNA, 15 bp, synthetic construct
  source 1..15: mol_type = other DNA
agtgacctgatcttt

SEQ ID NO: 17987 - DNA, 15 bp, synthetic construct
  source 1..15: mol_type = other DNA
ttctggttaggtatc

SEQ ID NO: 17988 - DNA, 15 bp, synthetic construct
  source 1..15: mol_type = other DNA
aacaggtccgtgtcg

SEQ ID NO: 17989 - DNA, 15 bp, synthetic construct
  source 1..15: mol_type = other DNA
tccgcaagagcaagc

SEQ ID NO: 17990 - DNA, 15 bp, synthetic construct
  source 1..15: mol_type = other DNA
ccatacagtaactgc

SEQ ID NO: 17991 - DNA, 15 bp, synthetic construct
  source 1..15: mol_type = other DNA
aaggagattatgctc

SEQ ID NO: 17992 - DNA, 15 bp, synthetic construct
  source 1..15: mol_type = other DNA
taggtcatcagcaga

SEQ ID NO: 17993 - DNA, 15 bp, synthetic construct
  source 1..15: mol_type = other DNA
ttaaactgccaaata

SEQ ID NO: 17994 - DNA, 15 bp, synthetic construct
  source 1..15: mol_type = other DNA
tcatgtactgttttc

SEQ ID NO: 17995 - DNA, 15 bp, synthetic construct
  source 1..15: mol_type = other DNA
tttcttccttccctc

SEQ ID NO: 17996 - DNA, 15 bp, synthetic construct
  source 1..15: mol_type = other DNA
gttaagcagcttttt

SEQ ID NO: 17997 - DNA, 15 bp, synthetic construct
  source 1..15: mol_type = other DNA
tttcactcatggcaa

SEQ ID NO: 17998 - DNA, 15 bp, synthetic construct
  source 1..15: mol_type = other DNA
gattagtgacttgaa

SEQ ID NO: 17999 - DNA, 15 bp, synthetic construct
  source 1..15: mol_type = other DNA
gagggaaatcatcat

SEQ ID NO: 18000 - DNA, 15 bp, synthetic construct
  source 1..15: mol_type = other DNA
ttaaagactaatacc

SEQ ID NO: 18001 - DNA, 15 bp, synthetic construct
  source 1..15: mol_type = other DNA
tgcagttgatgacat

SEQ ID NO: 18002 - DNA, 15 bp, synthetic construct
  source 1..15: mol_type = other DNA
tctcagcaactttgt

SEQ ID NO: 18003 - DNA, 15 bp, synthetic construct
  source 1..15: mol_type = other DNA
gtctgagagaaaaat

SEQ ID NO: 18004 - DNA, 15 bp, synthetic construct
  source 1..15: mol_type = other DNA
aaatctactttttgg

SEQ ID NO: 18005 - DNA, 15 bp, synthetic construct
  source 1..15: mol_type = other DNA
gtgtggttacttttg

SEQ ID NO: 18006 - DNA, 15 bp, synthetic construct
  source 1..15: mol_type = other DNA
aagcaccaggtctct

SEQ ID NO: 18007 - DNA, 15 bp, synthetic construct
  source 1..15: mol_type = other DNA
tgtcaaaagaacaca

SEQ ID NO: 18008 - DNA, 15 bp, synthetic construct
  source 1..15: mol_type = other DNA
ccttcggtgataagc

SEQ ID NO: 18009 - DNA, 15 bp, synthetic construct
  source 1..15: mol_type = other DNA
atctagtctaccata

SEQ ID NO: 18010 - DNA, 15 bp, synthetic construct
  source 1..15: mol_type = other DNA
tccagagaccaccta

SEQ ID NO: 18011 - DNA, 15 bp, synthetic construct
  source 1..15: mol_type = other DNA
catgtgcatctctca

SEQ ID NO: 18012 - DNA, 15 bp, synthetic construct
  source 1..15: mol_type = other DNA
aaatgtacatacctg

SEQ ID NO: 18013 - DNA, 15 bp, synthetic construct
  source 1..15: mol_type = other DNA
ttggaaggtattata

SEQ ID NO: 18014 - DNA, 15 bp, synthetic construct
  source 1..15: mol_type = other DNA
agttggaccatcaac

SEQ ID NO: 18015 - DNA, 15 bp, synthetic construct
  source 1..15: mol_type = other DNA
actgtgttaaaaagt

SEQ ID NO: 18016 - DNA, 15 bp, synthetic construct
  source 1..15: mol_type = other DNA
tagaattggattggg

SEQ ID NO: 18017 - DNA, 15 bp, synthetic construct
  source 1..15: mol_type = other DNA
gttaagggattgtgg

SEQ ID NO: 18018 - DNA, 15 bp, synthetic construct
  source 1..15: mol_type = other DNA
tatcttcttgatccg

SEQ ID NO: 18019 - DNA, 15 bp, synthetic construct
  source 1..15: mol_type = other DNA
tgattttgaagtgct

SEQ ID NO: 18020 - DNA, 15 bp, synthetic construct
  source 1..15: mol_type = other DNA
catgtatctacttgc

SEQ ID NO: 18021 - DNA, 15 bp, synthetic construct
  source 1..15: mol_type = other DNA
gtctctaatcagaaa

SEQ ID NO: 18022 - DNA, 15 bp, synthetic construct
  source 1..15: mol_type = other DNA
gagagaaataccata

SEQ ID NO: 18023 - DNA, 15 bp, synthetic construct
  source 1..15: mol_type = other DNA
aaggaaaggagatat

SEQ ID NO: 18024 - DNA, 15 bp, synthetic construct
  source 1..15: mol_type = other DNA
cttcatggaatcgag

SEQ ID NO: 18025 - DNA, 15 bp, synthetic construct
  source 1..15: mol_type = other DNA
tccgcatccttttct

SEQ ID NO: 18026 - DNA, 15 bp, synthetic construct
  source 1..15: mol_type = other DNA
agagcagaaacctga

SEQ ID NO: 18027 - DNA, 15 bp, synthetic construct
  source 1..15: mol_type = other DNA
tccgcatccttttct

SEQ ID NO: 18028 - DNA, 15 bp, synthetic construct
  source 1..15: mol_type = other DNA
agagcagaaacctga

SEQ ID NO: 18029 - DNA, 15 bp, synthetic construct
  source 1..15: mol_type = other DNA
tctcagcgtgaagtc

SEQ ID NO: 18030 - DNA, 15 bp, synthetic construct
  source 1..15: mol_type = other DNA
agtctaggcctgtgt

SEQ ID NO: 18031 - DNA, 15 bp, synthetic construct
  source 1..15: mol_type = other DNA
ttcttagggcctagg

SEQ ID NO: 18032 - DNA, 15 bp, synthetic construct
  source 1..15: mol_type = other DNA
ctcagcagttgatcc

SEQ ID NO: 18033 - DNA, 15 bp, synthetic construct
  source 1..15: mol_type = other DNA
tcacagtagagcaca

SEQ ID NO: 18034 - DNA, 15 bp, synthetic construct
  source 1..15: mol_type = other DNA
acactcctttttata

SEQ ID NO: 18035 - DNA, 15 bp, synthetic construct
  source 1..15: mol_type = other DNA
tcacagtagagcaca

SEQ ID NO: 18036 - DNA, 15 bp, synthetic construct
  source 1..15: mol_type = other DNA
acactcctttttata

SEQ ID NO: 18037 - DNA, 15 bp, synthetic construct
  source 1..15: mol_type = other DNA
gattcatcctcatgg

SEQ ID NO: 18038 - DNA, 15 bp, synthetic construct
  source 1..15: mol_type = other DNA
ggtgtccttttgcat

SEQ ID NO: 18039 - DNA, 15 bp, synthetic construct
  source 1..15: mol_type = other DNA
taaaacctcaaatgc

SEQ ID NO: 18040 - DNA, 15 bp, synthetic construct
  source 1..15: mol_type = other DNA
tctgaatgacttgct

SEQ ID NO: 18041 - DNA, 15 bp, synthetic construct
  source 1..15: mol_type = other DNA
ttgaaaagaacagta

SEQ ID NO: 18042 - DNA, 15 bp, synthetic construct
  source 1..15: mol_type = other DNA
agaaaaagctaaaat

SEQ ID NO: 18043 - DNA, 15 bp, synthetic construct
  source 1..15: mol_type = other DNA
agcatcaagagatct

SEQ ID NO: 18044 - DNA, 15 bp, synthetic construct
  source 1..15: mol_type = other DNA
ggaaacagatctgtg

SEQ ID NO: 18045 - DNA, 15 bp, synthetic construct
  source 1..15: mol_type = other DNA
tttcacactgtagag

SEQ ID NO: 18046 - DNA, 15 bp, synthetic construct
  source 1..15: mol_type = other DNA
tcttcttcccattca

SEQ ID NO: 18047 - DNA, 15 bp, synthetic construct
  source 1..15: mol_type = other DNA
caagttcagaaatgg

SEQ ID NO: 18048 - DNA, 15 bp, synthetic construct
  source 1..15: mol_type = other DNA
tctcattattagagt

SEQ ID NO: 18049 - DNA, 15 bp, synthetic construct
  source 1..15: mol_type = other DNA
taaaagttagaacag

SEQ ID NO: 18050 - DNA, 15 bp, synthetic construct
  source 1..15: mol_type = other DNA
accattgacctcaac

SEQ ID NO: 18051 - DNA, 15 bp, synthetic construct
  source 1..15: mol_type = other DNA
gatgaggctctaagc

SEQ ID NO: 18052 - DNA, 15 bp, synthetic construct
  source 1..15: mol_type = other DNA
tcaaacttcccattc

SEQ ID NO: 18053 - DNA, 15 bp, synthetic construct
  source 1..15: mol_type = other DNA
gcttgtcccccatcc

SEQ ID NO: 18054 - DNA, 15 bp, synthetic construct
  source 1..15: mol_type = other DNA
gtgaggtggcggaac

SEQ ID NO: 18055 - DNA, 15 bp, synthetic construct
  source 1..15: mol_type = other DNA
agatggaagctatga

SEQ ID NO: 18056 - DNA, 15 bp, synthetic construct
  source 1..15: mol_type = other DNA
gcaaaagtttgatgt

SEQ ID NO: 18057 - DNA, 15 bp, synthetic construct
  source 1..15: mol_type = other DNA
cagatggaatagaca

SEQ ID NO: 18058 - DNA, 15 bp, synthetic construct
  source 1..15: mol_type = other DNA
ggttgagtgcttact

SEQ ID NO: 18059 - DNA, 15 bp, synthetic construct
  source 1..15: mol_type = other DNA
gggcaactctataac

SEQ ID NO: 18060 - DNA, 15 bp, synthetic construct
  source 1..15: mol_type = other DNA
aacgaatattttggg

SEQ ID NO: 18061 - DNA, 15 bp, synthetic construct
  source 1..15: mol_type = other DNA
gtcgggattgtaagc

SEQ ID NO: 18062 - DNA, 15 bp, synthetic construct
  source 1..15: mol_type = other DNA
ccagcgtctccgttg

SEQ ID NO: 18063 - DNA, 15 bp, synthetic construct
  source 1..15: mol_type = other DNA
cgatcaccgcttacc

SEQ ID NO: 18064 - DNA, 15 bp, synthetic construct
  source 1..15: mol_type = other DNA
gaataatgggtgcat

SEQ ID NO: 18065 - DNA, 15 bp, synthetic construct
  source 1..15: mol_type = other DNA
ctggagcggaggagg

SEQ ID NO: 18066 - DNA, 15 bp, synthetic construct
  source 1..15: mol_type = other DNA
tctgcgcgaagagct

SEQ ID NO: 18067 - DNA, 15 bp, synthetic construct
  source 1..15: mol_type = other DNA
ccctggcgttggacc

SEQ ID NO: 18068 - DNA, 15 bp, synthetic construct
  source 1..15: mol_type = other DNA
gccgcgtgctgtgat

SEQ ID NO: 18069 - DNA, 15 bp, synthetic construct
  source 1..15: mol_type = other DNA
ggcctgcatctaagc

SEQ ID NO: 18070 - DNA, 15 bp, synthetic construct
  source 1..15: mol_type = other DNA
aagttctgccagatc

SEQ ID NO: 18071 - DNA, 15 bp, synthetic construct
  source 1..15: mol_type = other DNA
aggagctgtatgaac

SEQ ID NO: 18072 - DNA, 15 bp, synthetic construct
  source 1..15: mol_type = other DNA
attctgtgcttacct

SEQ ID NO: 18073 - DNA, 15 bp, synthetic construct
  source 1..15: mol_type = other DNA
atccggtcacactaa

SEQ ID NO: 18074 - DNA, 15 bp, synthetic construct
  source 1..15: mol_type = other DNA
agatcctgctcatgt

SEQ ID NO: 18075 - DNA, 15 bp, synthetic construct
  source 1..15: mol_type = other DNA
tccccagtacaacgc

SEQ ID NO: 18076 - DNA, 15 bp, synthetic construct
  source 1..15: mol_type = other DNA
cacctttgggtttac

SEQ ID NO: 18077 - DNA, 15 bp, synthetic construct
  source 1..15: mol_type = other DNA
gccgttgaagacttc

SEQ ID NO: 18078 - DNA, 15 bp, synthetic construct
  source 1..15: mol_type = other DNA
gtgaaatcctcgtac

SEQ ID NO: 18079 - DNA, 15 bp, synthetic construct
  source 1..15: mol_type = other DNA
atctcaccaacatcc

SEQ ID NO: 18080 - DNA, 15 bp, synthetic construct
  source 1..15: mol_type = other DNA
tcataccagctgctc

SEQ ID NO: 18081 - DNA, 15 bp, synthetic construct
  source 1..15: mol_type = other DNA
gctagctgcagatcc

SEQ ID NO: 18082 - DNA, 15 bp, synthetic construct
  source 1..15: mol_type = other DNA
tccgtatcggcgatg

SEQ ID NO: 18083 - DNA, 15 bp, synthetic construct
  source 1..15: mol_type = other DNA
ctaccaacagctaga

SEQ ID NO: 18084 - DNA, 15 bp, synthetic construct
  source 1..15: mol_type = other DNA
gcaaacagtatgatg

SEQ ID NO: 18085 - DNA, 15 bp, synthetic construct
  source 1..15: mol_type = other DNA
atgtgtgagatttct

SEQ ID NO: 18086 - DNA, 15 bp, synthetic construct
  source 1..15: mol_type = other DNA
agtactggtgacatc

SEQ ID NO: 18087 - DNA, 15 bp, synthetic construct
  source 1..15: mol_type = other DNA
tccttatctaggaga

SEQ ID NO: 18088 - DNA, 15 bp, synthetic construct
  source 1..15: mol_type = other DNA
gtacccgaaaccttc

SEQ ID NO: 18089 - DNA, 15 bp, synthetic construct
  source 1..15: mol_type = other DNA
cacagggagttgacc

SEQ ID NO: 18090 - DNA, 15 bp, synthetic construct
  source 1..15: mol_type = other DNA
tcctgttgtagaagt

SEQ ID NO: 18091 - DNA, 15 bp, synthetic construct
  source 1..15: mol_type = other DNA
tgggaagggtcgatg

SEQ ID NO: 18092 - DNA, 15 bp, synthetic construct
  source 1..15: mol_type = other DNA
taggcctcctatacc

SEQ ID NO: 18093 - DNA, 15 bp, synthetic construct
  source 1..15: mol_type = other DNA
atccgtcactctcac

SEQ ID NO: 18094 - DNA, 15 bp, synthetic construct
  source 1..15: mol_type = other DNA
ccgtgtcattggtga

SEQ ID NO: 18095 - DNA, 15 bp, synthetic construct
  source 1..15: mol_type = other DNA
catctgcacaaaatc

SEQ ID NO: 18096 - DNA, 15 bp, synthetic construct
  source 1..15: mol_type = other DNA
taggaggatcccgaa

SEQ ID NO: 18097 - DNA, 15 bp, synthetic construct
  source 1..15: mol_type = other DNA
tcctttcatctcatc

SEQ ID NO: 18098 - DNA, 15 bp, synthetic construct
  source 1..15: mol_type = other DNA
ctatccctcctctca

SEQ ID NO: 18099 - DNA, 15 bp, synthetic construct
  source 1..15: mol_type = other DNA
tcccaacagaaagtg

SEQ ID NO: 18100 - DNA, 15 bp, synthetic construct
  source 1..15: mol_type = other DNA
agaggagaggctaga

SEQ ID NO: 18101 - DNA, 15 bp, synthetic construct
  source 1..15: mol_type = other DNA
ccctaagacaattta

SEQ ID NO: 18102 - DNA, 15 bp, synthetic construct
  source 1..15: mol_type = other DNA
gagggtgtgacagta

SEQ ID NO: 18103 - DNA, 15 bp, synthetic construct
  source 1..15: mol_type = other DNA
ctcccccaagatagc

SEQ ID NO: 18104 - DNA, 15 bp, synthetic construct
  source 1..15: mol_type = other DNA
tggaccggtagatgt

SEQ ID NO: 18105 - DNA, 15 bp, synthetic construct
  source 1..15: mol_type = other DNA
ttttgtcctgcagtt

SEQ ID NO: 18106 - DNA, 15 bp, synthetic construct
  source 1..15: mol_type = other DNA
catagcgaggagaca

SEQ ID NO: 18107 - DNA, 15 bp, synthetic construct
  source 1..15: mol_type = other DNA
agtttctgcagtcca

SEQ ID NO: 18108 - DNA, 15 bp, synthetic construct
  source 1..15: mol_type = other DNA
ggaagtacttgagca

SEQ ID NO: 18109 - DNA, 15 bp, synthetic construct
  source 1..15: mol_type = other DNA
acatggtcggcttag

SEQ ID NO: 18110 - DNA, 15 bp, synthetic construct
  source 1..15: mol_type = other DNA
tgaggacccacctta

SEQ ID NO: 18111 - DNA, 15 bp, synthetic construct
  source 1..15: mol_type = other DNA
tgtgaggtcacactg

SEQ ID NO: 18112 - DNA, 15 bp, synthetic construct
  source 1..15: mol_type = other DNA
gggctgatgtctggt

SEQ ID NO: 18113 - DNA, 15 bp, synthetic construct
  source 1..15: mol_type = other DNA
acccatgggacaagc

SEQ ID NO: 18114 - DNA, 15 bp, synthetic construct
  source 1..15: mol_type = other DNA
ccattatccctctcg

SEQ ID NO: 18115 - DNA, 15 bp, synthetic construct
  source 1..15: mol_type = other DNA
tggtgagaccacaaa

SEQ ID NO: 18116 - DNA, 15 bp, synthetic construct
  source 1..15: mol_type = other DNA
ttgtagttccagttg

SEQ ID NO: 18117 - DNA, 15 bp, synthetic construct
  source 1..15: mol_type = other DNA
ggaggaatatgaccg

SEQ ID NO: 18118 - DNA, 15 bp, synthetic construct
  source 1..15: mol_type = other DNA
cgaaattgagtattg

SEQ ID NO: 18119 - DNA, 15 bp, synthetic construct
  source 1..15: mol_type = other DNA
ataggcaaaggttgc

SEQ ID NO: 18120 - DNA, 15 bp, synthetic construct
  source 1..15: mol_type = other DNA
cctgaaccttcttta

SEQ ID NO: 18121 - DNA, 15 bp, synthetic construct
  source 1..15: mol_type = other DNA
aaatagccaaccaca

SEQ ID NO: 18122 - DNA, 15 bp, synthetic construct
  source 1..15: mol_type = other DNA
catgacttgatacaa

SEQ ID NO: 18123 - DNA, 15 bp, synthetic construct
  source 1..15: mol_type = other DNA
acagctcattgcctc

SEQ ID NO: 18124 - DNA, 15 bp, synthetic construct
  source 1..15: mol_type = other DNA
tggaaaacaagaaag

SEQ ID NO: 18125 - DNA, 15 bp, synthetic construct
  source 1..15: mol_type = other DNA
gagctccccttacaa

SEQ ID NO: 18126 - DNA, 15 bp, synthetic construct
  source 1..15: mol_type = other DNA
aaatgaagggaccca

SEQ ID NO: 18127 - DNA, 15 bp, synthetic construct
  source 1..15: mol_type = other DNA
gttttacccgaaata

SEQ ID NO: 18128 - DNA, 15 bp, synthetic construct
  source 1..15: mol_type = other DNA
ctcgtacatagacct

SEQ ID NO: 18129 - DNA, 15 bp, synthetic construct
  source 1..15: mol_type = other DNA
gttttacccgaaata

SEQ ID NO: 18130 - DNA, 15 bp, synthetic construct
  source 1..15: mol_type = other DNA
ctcgtacatagacct

SEQ ID NO: 18131 - DNA, 15 bp, synthetic construct
  source 1..15: mol_type = other DNA
gtaggctatgtagat

SEQ ID NO: 18132 - DNA, 15 bp, synthetic construct
  source 1..15: mol_type = other DNA
tggtccgtctttacc

SEQ ID NO: 18133 - DNA, 15 bp, synthetic construct
  source 1..15: mol_type = other DNA
attgagcctaagtaa

SEQ ID NO: 18134 - DNA, 15 bp, synthetic construct
  source 1..15: mol_type = other DNA
gggaactcctgaatc

SEQ ID NO: 18135 - DNA, 15 bp, synthetic construct
  source 1..15: mol_type = other DNA
tccctccagtttagc

SEQ ID NO: 18136 - DNA, 15 bp, synthetic construct
  source 1..15: mol_type = other DNA
ttgccgttgtagaag

SEQ ID NO: 18137 - DNA, 15 bp, synthetic construct
  source 1..15: mol_type = other DNA
tctggaacaagtcga

SEQ ID NO: 18138 - DNA, 15 bp, synthetic construct
  source 1..15: mol_type = other DNA
tctagacactcagtc

SEQ ID NO: 18139 - DNA, 15 bp, synthetic construct
  source 1..15: mol_type = other DNA
cctgggtatagcaag

SEQ ID NO: 18140 - DNA, 15 bp, synthetic construct
  source 1..15: mol_type = other DNA
gcgtagacactgaga

SEQ ID NO: 18141 - DNA, 15 bp, synthetic construct
  source 1..15: mol_type = other DNA
aagacttacctgtgg

SEQ ID NO: 18142 - DNA, 15 bp, synthetic construct
  source 1..15: mol_type = other DNA
ttccgattgctctgc

SEQ ID NO: 18143 - DNA, 15 bp, synthetic construct
  source 1..15: mol_type = other DNA
agggtggtgagcttg

SEQ ID NO: 18144 - DNA, 15 bp, synthetic construct
  source 1..15: mol_type = other DNA
ttgtcaagggccatc

SEQ ID NO: 18145 - DNA, 15 bp, synthetic construct
  source 1..15: mol_type = other DNA
gcagagcatgacatc

SEQ ID NO: 18146 - DNA, 15 bp, synthetic construct
  source 1..15: mol_type = other DNA
acactcgcagagatc

SEQ ID NO: 18147 - DNA, 15 bp, synthetic construct
  source 1..15: mol_type = other DNA
actcatcttccaaca

SEQ ID NO: 18148 - DNA, 15 bp, synthetic construct
  source 1..15: mol_type = other DNA
caaagctgtgggtac

SEQ ID NO: 18149 - DNA, 15 bp, synthetic construct
  source 1..15: mol_type = other DNA
ttagcacacatcaca

SEQ ID NO: 18150 - DNA, 15 bp, synthetic construct
  source 1..15: mol_type = other DNA
ctggtagatgtcaca

SEQ ID NO: 18151 - DNA, 15 bp, synthetic construct
  source 1..15: mol_type = other DNA
agttccagttccacg

SEQ ID NO: 18152 - DNA, 15 bp, synthetic construct
  source 1..15: mol_type = other DNA
aggagatggcaatca

SEQ ID NO: 18153 - DNA, 15 bp, synthetic construct
  source 1..15: mol_type = other DNA
tatggagagtggatg

SEQ ID NO: 18154 - DNA, 15 bp, synthetic construct
  source 1..15: mol_type = other DNA
ggagttcggcgtcca

SEQ ID NO: 18155 - DNA, 15 bp, synthetic construct
  source 1..15: mol_type = other DNA
ccatgttgagctact

SEQ ID NO: 18156 - DNA, 15 bp, synthetic construct
  source 1..15: mol_type = other DNA
ttctgagcgagctga

SEQ ID NO: 18157 - DNA, 15 bp, synthetic construct
  source 1..15: mol_type = other DNA
ccatgttgagctact

SEQ ID NO: 18158 - DNA, 15 bp, synthetic construct
  source 1..15: mol_type = other DNA
ttctgagcgagctga

SEQ ID NO: 18159 - DNA, 15 bp, synthetic construct
  source 1..15: mol_type = other DNA
gccatgcggctgacc

SEQ ID NO: 18160 - DNA, 15 bp, synthetic construct
  source 1..15: mol_type = other DNA
cggatgctgaagagc

SEQ ID NO: 18161 - DNA, 15 bp, synthetic construct
  source 1..15: mol_type = other DNA
tggacctggatgcgc

SEQ ID NO: 18162 - DNA, 15 bp, synthetic construct
  source 1..15: mol_type = other DNA
accagtgttcccatc

SEQ ID NO: 18163 - DNA, 15 bp, synthetic construct
  source 1..15: mol_type = other DNA
ttctgaaactggact

SEQ ID NO: 18164 - DNA, 15 bp, synthetic construct
  source 1..15: mol_type = other DNA
ctcagcgatgtgatg

SEQ ID NO: 18165 - DNA, 15 bp, synthetic construct
  source 1..15: mol_type = other DNA
cttaggatggtttgg

SEQ ID NO: 18166 - DNA, 15 bp, synthetic construct
  source 1..15: mol_type = other DNA
tttctttacatttgc

SEQ ID NO: 18167 - DNA, 15 bp, synthetic construct
  source 1..15: mol_type = other DNA
tacccacttacgtcc

SEQ ID NO: 18168 - DNA, 15 bp, synthetic construct
  source 1..15: mol_type = other DNA
gctgagaggagagag

SEQ ID NO: 18169 - DNA, 15 bp, synthetic construct
  source 1..15: mol_type = other DNA
caagtggttcttgca

SEQ ID NO: 18170 - DNA, 15 bp, synthetic construct
  source 1..15: mol_type = other DNA
ggaccggcaccatta

SEQ ID NO: 18171 - DNA, 15 bp, synthetic construct
  source 1..15: mol_type = other DNA
cgaacttggtgaaca

SEQ ID NO: 18172 - DNA, 15 bp, synthetic construct
  source 1..15: mol_type = other DNA
gccagtccatttagg

SEQ ID NO: 18173 - DNA, 15 bp, synthetic construct
  source 1..15: mol_type = other DNA
gttactcagtcctca

SEQ ID NO: 18174 - DNA, 15 bp, synthetic construct
  source 1..15: mol_type = other DNA
atcccctttactgtg

SEQ ID NO: 18175 - DNA, 15 bp, synthetic construct
  source 1..15: mol_type = other DNA
ctatcaagaagtcga

SEQ ID NO: 18176 - DNA, 15 bp, synthetic construct
  source 1..15: mol_type = other DNA
gaattttagaagctg

SEQ ID NO: 18177 - DNA, 15 bp, synthetic construct
  source 1..15: mol_type = other DNA
agccaagctagcaac

SEQ ID NO: 18178 - DNA, 15 bp, synthetic construct
  source 1..15: mol_type = other DNA
acgtgtgcttcttcg

SEQ ID NO: 18179 - DNA, 15 bp, synthetic construct
  source 1..15: mol_type = other DNA
atactccgtcttgca

SEQ ID NO: 18180 - DNA, 15 bp, synthetic construct
  source 1..15: mol_type = other DNA
ggttcagcttagtag

SEQ ID NO: 18181 - DNA, 15 bp, synthetic construct
  source 1..15: mol_type = other DNA
tggcttacgatctac

SEQ ID NO: 18182 - DNA, 15 bp, synthetic construct
  source 1..15: mol_type = other DNA
caattcctaatgtgc

SEQ ID NO: 18183 - DNA, 15 bp, synthetic construct
  source 1..15: mol_type = other DNA
taggcaatgccatct

SEQ ID NO: 18184 - DNA, 15 bp, synthetic construct
  source 1..15: mol_type = other DNA
atgaaaagcataaaa

SEQ ID NO: 18185 - DNA, 15 bp, synthetic construct
  source 1..15: mol_type = other DNA
taactggcagaaaga

SEQ ID NO: 18186 - DNA, 15 bp, synthetic construct
  source 1..15: mol_type = other DNA
tgaaggaacagagtc

SEQ ID NO: 18187 - DNA, 15 bp, synthetic construct
  source 1..15: mol_type = other DNA
ttctcagaggttagg

SEQ ID NO: 18188 - DNA, 15 bp, synthetic construct
  source 1..15: mol_type = other DNA
gacctccatgttgta

SEQ ID NO: 18189 - DNA, 15 bp, synthetic construct
  source 1..15: mol_type = other DNA
tctaatgttccactc

SEQ ID NO: 18190 - DNA, 15 bp, synthetic construct
  source 1..15: mol_type = other DNA
cagatgaaccttacc

SEQ ID NO: 18191 - DNA, 15 bp, synthetic construct
  source 1..15: mol_type = other DNA
aggtggaactggacc

SEQ ID NO: 18192 - DNA, 15 bp, synthetic construct
  source 1..15: mol_type = other DNA
tgctccccaagatat

SEQ ID NO: 18193 - DNA, 15 bp, synthetic construct
  source 1..15: mol_type = other DNA
ggaaactcgagactg

SEQ ID NO: 18194 - DNA, 15 bp, synthetic construct
  source 1..15: mol_type = other DNA
tgcaggccctcttcg

SEQ ID NO: 18195 - DNA, 15 bp, synthetic construct
  source 1..15: mol_type = other DNA
ctcctccgggacgtt

SEQ ID NO: 18196 - DNA, 15 bp, synthetic construct
  source 1..15: mol_type = other DNA
gctctccgccgacct

SEQ ID NO: 18197 - DNA, 15 bp, synthetic construct
  source 1..15: mol_type = other DNA
agctggcgctgtact

SEQ ID NO: 18198 - DNA, 15 bp, synthetic construct
  source 1..15: mol_type = other DNA
agcattccggtctca

SEQ ID NO: 18199 - DNA, 15 bp, synthetic construct
  source 1..15: mol_type = other DNA
cgtcccgtccccatc

SEQ ID NO: 18200 - DNA, 15 bp, synthetic construct
  source 1..15: mol_type = other DNA
tctccttctccacgt

SEQ ID NO: 18201 - DNA, 15 bp, synthetic construct
  source 1..15: mol_type = other DNA
ccgaacggctacggc

SEQ ID NO: 18202 - DNA, 15 bp, synthetic construct
  source 1..15: mol_type = other DNA
gctcctctcggacct

SEQ ID NO: 18203 - DNA, 15 bp, synthetic construct
  source 1..15: mol_type = other DNA
gtggtgagccgcatc

SEQ ID NO: 18204 - DNA, 15 bp, synthetic construct
  source 1..15: mol_type = other DNA
ctcctcccactccat

SEQ ID NO: 18205 - DNA, 15 bp, synthetic construct
  source 1..15: mol_type = other DNA
caaattgctgtgtag

SEQ ID NO: 18206 - DNA, 15 bp, synthetic construct
  source 1..15: mol_type = other DNA
tgaccggatgaactg

SEQ ID NO: 18207 - DNA, 15 bp, synthetic construct
  source 1..15: mol_type = other DNA
gtaccatgaagaagg

SEQ ID NO: 18208 - DNA, 15 bp, synthetic construct
  source 1..15: mol_type = other DNA
ccgtgggctaatcaa

SEQ ID NO: 18209 - DNA, 15 bp, synthetic construct
  source 1..15: mol_type = other DNA
cccaggttgtgaact

SEQ ID NO: 18210 - DNA, 15 bp, synthetic construct
  source 1..15: mol_type = other DNA
ggatcactctgcatt

SEQ ID NO: 18211 - DNA, 15 bp, synthetic construct
  source 1..15: mol_type = other DNA
agggaaactgacgag

SEQ ID NO: 18212 - DNA, 15 bp, synthetic construct
  source 1..15: mol_type = other DNA
ctccctacactaggc

SEQ ID NO: 18213 - DNA, 15 bp, synthetic construct
  source 1..15: mol_type = other DNA
acgctctattccatc

SEQ ID NO: 18214 - DNA, 15 bp, synthetic construct
  source 1..15: mol_type = other DNA
ttctggcagttctat

SEQ ID NO: 18215 - DNA, 15 bp, synthetic construct
  source 1..15: mol_type = other DNA
acctcttctcagtct

SEQ ID NO: 18216 - DNA, 15 bp, synthetic construct
  source 1..15: mol_type = other DNA
atcggcttcctgtaa

SEQ ID NO: 18217 - DNA, 15 bp, synthetic construct
  source 1..15: mol_type = other DNA
gactgactcccaact

SEQ ID NO: 18218 - DNA, 15 bp, synthetic construct
  source 1..15: mol_type = other DNA
ttgctgaagagttcg

SEQ ID NO: 18219 - DNA, 15 bp, synthetic construct
  source 1..15: mol_type = other DNA
agacttcaacatctc

SEQ ID NO: 18220 - DNA, 15 bp, synthetic construct
  source 1..15: mol_type = other DNA
ctgatttgtacattg

SEQ ID NO: 18221 - DNA, 15 bp, synthetic construct
  source 1..15: mol_type = other DNA
aattgttgctgttct

SEQ ID NO: 18222 - DNA, 15 bp, synthetic construct
  source 1..15: mol_type = other DNA
gagacaccgtgagat

SEQ ID NO: 18223 - DNA, 15 bp, synthetic construct
  source 1..15: mol_type = other DNA
agggaatccccatct

SEQ ID NO: 18224 - DNA, 15 bp, synthetic construct
  source 1..15: mol_type = other DNA
gattcatttccacca

SEQ ID NO: 18225 - DNA, 15 bp, synthetic construct
  source 1..15: mol_type = other DNA
tggaaatgaatctag

SEQ ID NO: 18226 - DNA, 15 bp, synthetic construct
  source 1..15: mol_type = other DNA
tacacccccataaat

SEQ ID NO: 18227 - DNA, 15 bp, synthetic construct
  source 1..15: mol_type = other DNA
ctggctatttatggg

SEQ ID NO: 18228 - DNA, 15 bp, synthetic construct
  source 1..15: mol_type = other DNA
gaagtccatgaggat

SEQ ID NO: 18229 - DNA, 15 bp, synthetic construct
  source 1..15: mol_type = other DNA
gctggaggtgtttga

SEQ ID NO: 18230 - DNA, 15 bp, synthetic construct
  source 1..15: mol_type = other DNA
agggaaggtttttgg

SEQ ID NO: 18231 - DNA, 15 bp, synthetic construct
  source 1..15: mol_type = other DNA
acaatgttgtgagca

SEQ ID NO: 18232 - DNA, 15 bp, synthetic construct
  source 1..15: mol_type = other DNA
agtcacttacttctc

SEQ ID NO: 18233 - DNA, 15 bp, synthetic construct
  source 1..15: mol_type = other DNA
ttgacatccagctcg

SEQ ID NO: 18234 - DNA, 15 bp, synthetic construct
  source 1..15: mol_type = other DNA
ggataattttaagtt

SEQ ID NO: 18235 - DNA, 15 bp, synthetic construct
  source 1..15: mol_type = other DNA
gttgaaacgagccag

SEQ ID NO: 18236 - DNA, 15 bp, synthetic construct
  source 1..15: mol_type = other DNA
gttgcctgagatccg

SEQ ID NO: 18237 - DNA, 15 bp, synthetic construct
  source 1..15: mol_type = other DNA
gagttccggaataaa

SEQ ID NO: 18238 - DNA, 15 bp, synthetic construct
  source 1..15: mol_type = other DNA
agtctgagcttgtct

SEQ ID NO: 18239 - DNA, 15 bp, synthetic construct
  source 1..15: mol_type = other DNA
aatccagtggcttaa

SEQ ID NO: 18240 - DNA, 15 bp, synthetic construct
  source 1..15: mol_type = other DNA
ccgttcatcgttgcg

SEQ ID NO: 18241 - DNA, 15 bp, synthetic construct
  source 1..15: mol_type = other DNA
ctccaccgagtcagc

SEQ ID NO: 18242 - DNA, 15 bp, synthetic construct
  source 1..15: mol_type = other DNA
cgtagtagctatagg

SEQ ID NO: 18243 - DNA, 15 bp, synthetic construct
  source 1..15: mol_type = other DNA
tacacccagtacagg

SEQ ID NO: 18244 - DNA, 15 bp, synthetic construct
  source 1..15: mol_type = other DNA
tctgagaagctccat

SEQ ID NO: 18245 - DNA, 15 bp, synthetic construct
  source 1..15: mol_type = other DNA
gggaagaatcctaga

SEQ ID NO: 18246 - DNA, 15 bp, synthetic construct
  source 1..15: mol_type = other DNA
accgtgatccaagac

SEQ ID NO: 18247 - DNA, 15 bp, synthetic construct
  source 1..15: mol_type = other DNA
atcaacctccttcct

SEQ ID NO: 18248 - DNA, 15 bp, synthetic construct
  source 1..15: mol_type = other DNA
ccgctgttttaaacg

SEQ ID NO: 18249 - DNA, 15 bp, synthetic construct
  source 1..15: mol_type = other DNA
atccagacatctcct

SEQ ID NO: 18250 - DNA, 15 bp, synthetic construct
  source 1..15: mol_type = other DNA
ggaaggtttcagatg

SEQ ID NO: 18251 - DNA, 15 bp, synthetic construct
  source 1..15: mol_type = other DNA
gtatataccaggtgc

SEQ ID NO: 18252 - DNA, 15 bp, synthetic construct
  source 1..15: mol_type = other DNA
ttcattcctcagggt

SEQ ID NO: 18253 - DNA, 15 bp, synthetic construct
  source 1..15: mol_type = other DNA
gatgtgtgcacctgc

SEQ ID NO: 18254 - DNA, 15 bp, synthetic construct
  source 1..15: mol_type = other DNA
cacgaagtctccgtt

SEQ ID NO: 18255 - DNA, 15 bp, synthetic construct
  source 1..15: mol_type = other DNA
gatgtgtgcacctgc

SEQ ID NO: 18256 - DNA, 15 bp, synthetic construct
  source 1..15: mol_type = other DNA
cacgaagtctccgtt

SEQ ID NO: 18257 - DNA, 15 bp, synthetic construct
  source 1..15: mol_type = other DNA
tctctctcattccag

SEQ ID NO: 18258 - DNA, 15 bp, synthetic construct
  source 1..15: mol_type = other DNA
ggtttgaccaacaac

SEQ ID NO: 18259 - DNA, 15 bp, synthetic construct
  source 1..15: mol_type = other DNA
ggacagcaaaagccc

SEQ ID NO: 18260 - DNA, 15 bp, synthetic construct
  source 1..15: mol_type = other DNA
aagttgtcatactcg

SEQ ID NO: 18261 - DNA, 15 bp, synthetic construct
  source 1..15: mol_type = other DNA
ctccttcaggagtgg

SEQ ID NO: 18262 - DNA, 15 bp, synthetic construct
  source 1..15: mol_type = other DNA
gccgcagttgttgtg

SEQ ID NO: 18263 - DNA, 15 bp, synthetic construct
  source 1..15: mol_type = other DNA
caggcacagatgtag

SEQ ID NO: 18264 - DNA, 15 bp, synthetic construct
  source 1..15: mol_type = other DNA
ccatagggttctctc

SEQ ID NO: 18265 - DNA, 15 bp, synthetic construct
  source 1..15: mol_type = other DNA
cagagagaaccctat

SEQ ID NO: 18266 - DNA, 15 bp, synthetic construct
  source 1..15: mol_type = other DNA
cctcgtaggtcttag

SEQ ID NO: 18267 - DNA, 15 bp, synthetic construct
  source 1..15: mol_type = other DNA
acctacgaggtgtgg

SEQ ID NO: 18268 - DNA, 15 bp, synthetic construct
  source 1..15: mol_type = other DNA
tgcattcctcacacg

SEQ ID NO: 18269 - DNA, 15 bp, synthetic construct
  source 1..15: mol_type = other DNA
ctacgctcctgcgtg

SEQ ID NO: 18270 - DNA, 15 bp, synthetic construct
  source 1..15: mol_type = other DNA
ctgggttctgtggtc

SEQ ID NO: 18271 - DNA, 15 bp, synthetic construct
  source 1..15: mol_type = other DNA
aaggacttccactct

SEQ ID NO: 18272 - DNA, 15 bp, synthetic construct
  source 1..15: mol_type = other DNA
cttgtgcaccaggac

SEQ ID NO: 18273 - DNA, 15 bp, synthetic construct
  source 1..15: mol_type = other DNA
agctacaccatggaa

SEQ ID NO: 18274 - DNA, 15 bp, synthetic construct
  source 1..15: mol_type = other DNA
gcagcaggcacagta

SEQ ID NO: 18275 - DNA, 15 bp, synthetic construct
  source 1..15: mol_type = other DNA
agctacaccatggaa

SEQ ID NO: 18276 - DNA, 15 bp, synthetic construct
  source 1..15: mol_type = other DNA
gcagcaggcacagta

SEQ ID NO: 18277 - DNA, 15 bp, synthetic construct
  source 1..15: mol_type = other DNA
gctactgctgctatg

SEQ ID NO: 18278 - DNA, 15 bp, synthetic construct
  source 1..15: mol_type = other DNA
accgtggtggaggat

SEQ ID NO: 18279 - DNA, 15 bp, synthetic construct
  source 1..15: mol_type = other DNA
gatattctggtgtct

SEQ ID NO: 18280 - DNA, 15 bp, synthetic construct
  source 1..15: mol_type = other DNA
aagagcagtcagagc

SEQ ID NO: 18281 - DNA, 15 bp, synthetic construct
  source 1..15: mol_type = other DNA
ctttctctgagctgg

SEQ ID NO: 18282 - DNA, 15 bp, synthetic construct
  source 1..15: mol_type = other DNA
ctcccgcagcatgta

SEQ ID NO: 18283 - DNA, 15 bp, synthetic construct
  source 1..15: mol_type = other DNA
atggtgggctttaag

SEQ ID NO: 18284 - DNA, 15 bp, synthetic construct
  source 1..15: mol_type = other DNA
tcccagatctggaac

SEQ ID NO: 18285 - DNA, 15 bp, synthetic construct
  source 1..15: mol_type = other DNA
tatgaacctcatgcc

SEQ ID NO: 18286 - DNA, 15 bp, synthetic construct
  source 1..15: mol_type = other DNA
ggtccttacgttctc

SEQ ID NO: 18287 - DNA, 15 bp, synthetic construct
  source 1..15: mol_type = other DNA
cttagtgccctacgg

SEQ ID NO: 18288 - DNA, 15 bp, synthetic construct
  source 1..15: mol_type = other DNA
cctctcccctagtta

SEQ ID NO: 18289 - DNA, 15 bp, synthetic construct
  source 1..15: mol_type = other DNA
tctctgggtacagag

SEQ ID NO: 18290 - DNA, 15 bp, synthetic construct
  source 1..15: mol_type = other DNA
tagccctgaagtgga

SEQ ID NO: 18291 - DNA, 15 bp, synthetic construct
  source 1..15: mol_type = other DNA
agttccggtgagtcc

SEQ ID NO: 18292 - DNA, 15 bp, synthetic construct
  source 1..15: mol_type = other DNA
gatggagatggagta

SEQ ID NO: 18293 - DNA, 15 bp, synthetic construct
  source 1..15: mol_type = other DNA
gctgtcttacatcct

SEQ ID NO: 18294 - DNA, 15 bp, synthetic construct
  source 1..15: mol_type = other DNA
tgagggtgtagtagc

SEQ ID NO: 18295 - DNA, 15 bp, synthetic construct
  source 1..15: mol_type = other DNA
gaagcaggtggaaca

SEQ ID NO: 18296 - DNA, 15 bp, synthetic construct
  source 1..15: mol_type = other DNA
gcttctcgtcgtcat

SEQ ID NO: 18297 - DNA, 15 bp, synthetic construct
  source 1..15: mol_type = other DNA
gaagcaggtggaaca

SEQ ID NO: 18298 - DNA, 15 bp, synthetic construct
  source 1..15: mol_type = other DNA
gcttctcgtcgtcat

SEQ ID NO: 18299 - DNA, 15 bp, synthetic construct
  source 1..15: mol_type = other DNA
ggtgcccctctttat

SEQ ID NO: 18300 - DNA, 15 bp, synthetic construct
  source 1..15: mol_type = other DNA
cgcaattccacttaa

SEQ ID NO: 18301 - DNA, 15 bp, synthetic construct
  source 1..15: mol_type = other DNA
actctgacaaatgcc

SEQ ID NO: 18302 - DNA, 15 bp, synthetic construct
  source 1..15: mol_type = other DNA
tcttgggaacccaat

SEQ ID NO: 18303 - DNA, 15 bp, synthetic construct
  source 1..15: mol_type = other DNA
ccacccagcaagcag

SEQ ID NO: 18304 - DNA, 15 bp, synthetic construct
  source 1..15: mol_type = other DNA
ctggacgtggaaacg

SEQ ID NO: 18305 - DNA, 15 bp, synthetic construct
  source 1..15: mol_type = other DNA
ctgcaagaagttgac

SEQ ID NO: 18306 - DNA, 15 bp, synthetic construct
  source 1..15: mol_type = other DNA
taagtctgacagacc

SEQ ID NO: 18307 - DNA, 15 bp, synthetic construct
  source 1..15: mol_type = other DNA
gaatgcgctgggtag

SEQ ID NO: 18308 - DNA, 15 bp, synthetic construct
  source 1..15: mol_type = other DNA
ttgaaatggatcttc

SEQ ID NO: 18309 - DNA, 15 bp, synthetic construct
  source 1..15: mol_type = other DNA
tcacgagtcagatgt

SEQ ID NO: 18310 - DNA, 15 bp, synthetic construct
  source 1..15: mol_type = other DNA
ttccactgtctgctc

SEQ ID NO: 18311 - DNA, 15 bp, synthetic construct
  source 1..15: mol_type = other DNA
aagaggacagtaagg

SEQ ID NO: 18312 - DNA, 15 bp, synthetic construct
  source 1..15: mol_type = other DNA
ttcatctcatagtcg

SEQ ID NO: 18313 - DNA, 15 bp, synthetic construct
  source 1..15: mol_type = other DNA
actccgaatccgaag

SEQ ID NO: 18314 - DNA, 15 bp, synthetic construct
  source 1..15: mol_type = other DNA
ggaagagtgctgtca

SEQ ID NO: 18315 - DNA, 15 bp, synthetic construct
  source 1..15: mol_type = other DNA
actcttcctgtattc

SEQ ID NO: 18316 - DNA, 15 bp, synthetic construct
  source 1..15: mol_type = other DNA
aggatctggttctta

SEQ ID NO: 18317 - DNA, 15 bp, synthetic construct
  source 1..15: mol_type = other DNA
cgaggtctgctatgg

SEQ ID NO: 18318 - DNA, 15 bp, synthetic construct
  source 1..15: mol_type = other DNA
gtttggtcttagaat

SEQ ID NO: 18319 - DNA, 15 bp, synthetic construct
  source 1..15: mol_type = other DNA
ctgaagcactctctc

SEQ ID NO: 18320 - DNA, 15 bp, synthetic construct
  source 1..15: mol_type = other DNA
caccgtgtagcggta

SEQ ID NO: 18321 - DNA, 15 bp, synthetic construct
  source 1..15: mol_type = other DNA
cttcgggagtcccag

SEQ ID NO: 18322 - DNA, 15 bp, synthetic construct
  source 1..15: mol_type = other DNA
gctgtcgtagtcctc

SEQ ID NO: 18323 - DNA, 15 bp, synthetic construct
  source 1..15: mol_type = other DNA
cttcgggagtcccag

SEQ ID NO: 18324 - DNA, 15 bp, synthetic construct
  source 1..15: mol_type = other DNA
gctgtcgtagtcctc

SEQ ID NO: 18325 - DNA, 15 bp, synthetic construct
  source 1..15: mol_type = other DNA
tgacatccctatcgt

SEQ ID NO: 18326 - DNA, 15 bp, synthetic construct
  source 1..15: mol_type = other DNA
tccattgcatttgtc

SEQ ID NO: 18327 - DNA, 15 bp, synthetic construct
  source 1..15: mol_type = other DNA
ggcccttcgttgttc

SEQ ID NO: 18328 - DNA, 15 bp, synthetic construct
  source 1..15: mol_type = other DNA
gggtgggcgcggatc

SEQ ID NO: 18329 - DNA, 15 bp, synthetic construct
  source 1..15: mol_type = other DNA
gcaaaagccacccag

SEQ ID NO: 18330 - DNA, 15 bp, synthetic construct
  source 1..15: mol_type = other DNA
tggaggatgtgctta

SEQ ID NO: 18331 - DNA, 15 bp, synthetic construct
  source 1..15: mol_type = other DNA
tggaggatgtgctta

SEQ ID NO: 18332 - DNA, 15 bp, synthetic construct
  source 1..15: mol_type = other DNA
ggtcgagtgtgagtg

SEQ ID NO: 18333 - DNA, 15 bp, synthetic construct
  source 1..15: mol_type = other DNA
cacgggactacaact

SEQ ID NO: 18334 - DNA, 15 bp, synthetic construct
  source 1..15: mol_type = other DNA
tgtatgttggagaat

SEQ ID NO: 18335 - DNA, 15 bp, synthetic construct
  source 1..15: mol_type = other DNA
cttgttttgtcctgc

SEQ ID NO: 18336 - DNA, 15 bp, synthetic construct
  source 1..15: mol_type = other DNA
caggattatagagtc

SEQ ID NO: 18337 - DNA, 15 bp, synthetic construct
  source 1..15: mol_type = other DNA
gggctcagatgaaag

SEQ ID NO: 18338 - DNA, 15 bp, synthetic construct
  source 1..15: mol_type = other DNA
atcagcactgatggt

SEQ ID NO: 18339 - DNA, 15 bp, synthetic construct
  source 1..15: mol_type = other DNA
tcagtgtagacatgc

SEQ ID NO: 18340 - DNA, 15 bp, synthetic construct
  source 1..15: mol_type = other DNA
cagctggtactccac

SEQ ID NO: 18341 - DNA, 15 bp, synthetic construct
  source 1..15: mol_type = other DNA
tccccagactctcgc

SEQ ID NO: 18342 - DNA, 15 bp, synthetic construct
  source 1..15: mol_type = other DNA
gctgaggtaccctat

SEQ ID NO: 18343 - DNA, 15 bp, synthetic construct
  source 1..15: mol_type = other DNA
agtacacaatctgaa

SEQ ID NO: 18344 - DNA, 15 bp, synthetic construct
  source 1..15: mol_type = other DNA
acgtaggagtggttg

SEQ ID NO: 18345 - DNA, 15 bp, synthetic construct
  source 1..15: mol_type = other DNA
ggtgagctgcatcgg

SEQ ID NO: 18346 - DNA, 15 bp, synthetic construct
  source 1..15: mol_type = other DNA
agaggaagagcatca

SEQ ID NO: 18347 - DNA, 15 bp, synthetic construct
  source 1..15: mol_type = other DNA
catcaccattgaatc

SEQ ID NO: 18348 - DNA, 15 bp, synthetic construct
  source 1..15: mol_type = other DNA
cgacgatatccccat

SEQ ID NO: 18349 - DNA, 15 bp, synthetic construct
  source 1..15: mol_type = other DNA
catcaccattgaatc

SEQ ID NO: 18350 - DNA, 15 bp, synthetic construct
  source 1..15: mol_type = other DNA
cgacgatatccccat

SEQ ID NO: 18351 - DNA, 15 bp, synthetic construct
  source 1..15: mol_type = other DNA
actttgagcactccc

SEQ ID NO: 18352 - DNA, 15 bp, synthetic construct
  source 1..15: mol_type = other DNA
ccatccacccggaat

SEQ ID NO: 18353 - DNA, 15 bp, synthetic construct
  source 1..15: mol_type = other DNA
actttgagcactccc

SEQ ID NO: 18354 - DNA, 15 bp, synthetic construct
  source 1..15: mol_type = other DNA
ccatccacccggaat

SEQ ID NO: 18355 - DNA, 15 bp, synthetic construct
  source 1..15: mol_type = other DNA
gacctgtgagatggc

SEQ ID NO: 18356 - DNA, 15 bp, synthetic construct
  source 1..15: mol_type = other DNA
tatggtgatgatgcc

SEQ ID NO: 18357 - DNA, 15 bp, synthetic construct
  source 1..15: mol_type = other DNA
gacctgtgagatggc

SEQ ID NO: 18358 - DNA, 15 bp, synthetic construct
  source 1..15: mol_type = other DNA
tatggtgatgatgcc

SEQ ID NO: 18359 - DNA, 15 bp, synthetic construct
  source 1..15: mol_type = other DNA
aacgtgccctacaag

SEQ ID NO: 18360 - DNA, 15 bp, synthetic construct
  source 1..15: mol_type = other DNA
atgctgctgtactcg

SEQ ID NO: 18361 - DNA, 15 bp, synthetic construct
  source 1..15: mol_type = other DNA
aacgtgccctacaag

SEQ ID NO: 18362 - DNA, 15 bp, synthetic construct
  source 1..15: mol_type = other DNA
atgctgctgtactcg

SEQ ID NO: 18363 - DNA, 15 bp, synthetic construct
  source 1..15: mol_type = other DNA
ctgactggcctatct

SEQ ID NO: 18364 - DNA, 15 bp, synthetic construct
  source 1..15: mol_type = other DNA
gaggaggcattagat

SEQ ID NO: 18365 - DNA, 15 bp, synthetic construct
  source 1..15: mol_type = other DNA
ccaggtcatctaatg

SEQ ID NO: 18366 - DNA, 15 bp, synthetic construct
  source 1..15: mol_type = other DNA
ggagtagctgaggag

SEQ ID NO: 18367 - DNA, 15 bp, synthetic construct
  source 1..15: mol_type = other DNA
aacccatgcagcaaa

SEQ ID NO: 18368 - DNA, 15 bp, synthetic construct
  source 1..15: mol_type = other DNA
tttgcagatcatcgc

SEQ ID NO: 18369 - DNA, 15 bp, synthetic construct
  source 1..15: mol_type = other DNA
cgcatctgctgagtc

SEQ ID NO: 18370 - DNA, 15 bp, synthetic construct
  source 1..15: mol_type = other DNA
tcaaggtgagtcgag

SEQ ID NO: 18371 - DNA, 15 bp, synthetic construct
  source 1..15: mol_type = other DNA
gctctcccgagccag

SEQ ID NO: 18372 - DNA, 15 bp, synthetic construct
  source 1..15: mol_type = other DNA
tcggtgacacagcat

SEQ ID NO: 18373 - DNA, 15 bp, synthetic construct
  source 1..15: mol_type = other DNA
ccctcccttagtgat

SEQ ID NO: 18374 - DNA, 15 bp, synthetic construct
  source 1..15: mol_type = other DNA
aaatcgtgcgcgaca

SEQ ID NO: 18375 - DNA, 15 bp, synthetic construct
  source 1..15: mol_type = other DNA
acacctacccaggaa

SEQ ID NO: 18376 - DNA, 15 bp, synthetic construct
  source 1..15: mol_type = other DNA
ggacctgaccgacta

SEQ ID NO: 18377 - DNA, 15 bp, synthetic construct
  source 1..15: mol_type = other DNA
tgtagcctcgctcag

SEQ ID NO: 18378 - DNA, 15 bp, synthetic construct
  source 1..15: mol_type = other DNA
gtccctgactaagcc

SEQ ID NO: 18379 - DNA, 15 bp, synthetic construct
  source 1..15: mol_type = other DNA
tgtcagaaatcaagc

SEQ ID NO: 18380 - DNA, 15 bp, synthetic construct
  source 1..15: mol_type = other DNA
agcgtggcatcctga

SEQ ID NO: 18381 - DNA, 15 bp, synthetic construct
  source 1..15: mol_type = other DNA
cgcagctcgttgtag

SEQ ID NO: 18382 - DNA, 15 bp, synthetic construct
  source 1..15: mol_type = other DNA
caccaggtgagtgga

SEQ ID NO: 18383 - DNA, 15 bp, synthetic construct
  source 1..15: mol_type = other DNA
tgcccaccatgacgc

SEQ ID NO: 18384 - DNA, 15 bp, synthetic construct
  source 1..15: mol_type = other DNA
ccgcctgagtccatc

SEQ ID NO: 18385 - DNA, 15 bp, synthetic construct
  source 1..15: mol_type = other DNA
tgcccaccatgacgc

SEQ ID NO: 18386 - DNA, 15 bp, synthetic construct
  source 1..15: mol_type = other DNA
ccgcctgagtccatc

SEQ ID NO: 18387 - DNA, 15 bp, synthetic construct
  source 1..15: mol_type = other DNA
ggagttagaggctag

SEQ ID NO: 18388 - DNA, 15 bp, synthetic construct
  source 1..15: mol_type = other DNA
tctatctccccgtca

SEQ ID NO: 18389 - DNA, 15 bp, synthetic construct
  source 1..15: mol_type = other DNA
gagaatggctgctcc

SEQ ID NO: 18390 - DNA, 15 bp, synthetic construct
  source 1..15: mol_type = other DNA
tgacaggccctccgt

SEQ ID NO: 18391 - DNA, 15 bp, synthetic construct
  source 1..15: mol_type = other DNA
cggaggcactcggtt

SEQ ID NO: 18392 - DNA, 15 bp, synthetic construct
  source 1..15: mol_type = other DNA
agctacagcatcaag

SEQ ID NO: 18393 - DNA, 15 bp, synthetic construct
  source 1..15: mol_type = other DNA
gtcgtcgtctgtgaa

SEQ ID NO: 18394 - DNA, 15 bp, synthetic construct
  source 1..15: mol_type = other DNA
tacgtacaggaaagg

SEQ ID NO: 18395 - DNA, 15 bp, synthetic construct
  source 1..15: mol_type = other DNA
gtcgtcgtctgtgaa

SEQ ID NO: 18396 - DNA, 15 bp, synthetic construct
  source 1..15: mol_type = other DNA
tacgtacaggaaagg

SEQ ID NO: 18397 - DNA, 15 bp, synthetic construct
  source 1..15: mol_type = other DNA
actcactcttgacgc

SEQ ID NO: 18398 - DNA, 15 bp, synthetic construct
  source 1..15: mol_type = other DNA
gagcttcaagaagca

SEQ ID NO: 18399 - DNA, 15 bp, synthetic construct
  source 1..15: mol_type = other DNA
actcactcttgacgc

SEQ ID NO: 18400 - DNA, 15 bp, synthetic construct
  source 1..15: mol_type = other DNA
gagcttcaagaagca

SEQ ID NO: 18401 - DNA, 15 bp, synthetic construct
  source 1..15: mol_type = other DNA
tccacaccctccttc

SEQ ID NO: 18402 - DNA, 15 bp, synthetic construct
  source 1..15: mol_type = other DNA
aacgtccccaacgtc

SEQ ID NO: 18403 - DNA, 15 bp, synthetic construct
  source 1..15: mol_type = other DNA
aggccagtcaccacg

SEQ ID NO: 18404 - DNA, 15 bp, synthetic construct
  source 1..15: mol_type = other DNA
agcatccaggagatc

SEQ ID NO: 18405 - DNA, 15 bp, synthetic construct
  source 1..15: mol_type = other DNA
aggccagtcaccacg

SEQ ID NO: 18406 - DNA, 15 bp, synthetic construct
  source 1..15: mol_type = other DNA
agcatccaggagatc

SEQ ID NO: 18407 - DNA, 15 bp, synthetic construct
  source 1..15: mol_type = other DNA
tccttgtactttcgc

SEQ ID NO: 18408 - DNA, 15 bp, synthetic construct
  source 1..15: mol_type = other DNA
agtgcgcctccgttg

SEQ ID NO: 18409 - DNA, 15 bp, synthetic construct
  source 1..15: mol_type = other DNA
tagaacctctaatta

SEQ ID NO: 18410 - DNA, 15 bp, synthetic construct
  source 1..15: mol_type = other DNA
aatgtgtgtgattga

SEQ ID NO: 18411 - DNA, 15 bp, synthetic construct
  source 1..15: mol_type = other DNA
tgttttagaagtggg

SEQ ID NO: 18412 - DNA, 15 bp, synthetic construct
  source 1..15: mol_type = other DNA
aatccagacttccat

SEQ ID NO: 18413 - DNA, 15 bp, synthetic construct
  source 1..15: mol_type = other DNA
gatttggtaaaccgc

SEQ ID NO: 18414 - DNA, 15 bp, synthetic construct
  source 1..15: mol_type = other DNA
catgtaataattaga

SEQ ID NO: 18415 - DNA, 15 bp, synthetic construct
  source 1..15: mol_type = other DNA
ttcactgtgtccttt

SEQ ID NO: 18416 - DNA, 15 bp, synthetic construct
  source 1..15: mol_type = other DNA
aggaattttataagc

SEQ ID NO: 18417 - DNA, 15 bp, synthetic construct
  source 1..15: mol_type = other DNA
ggccattagtaacat

SEQ ID NO: 18418 - DNA, 15 bp, synthetic construct
  source 1..15: mol_type = other DNA
ttccctccccttttc

SEQ ID NO: 18419 - DNA, 15 bp, synthetic construct
  source 1..15: mol_type = other DNA
gaacattggtcactt

SEQ ID NO: 18420 - DNA, 15 bp, synthetic construct
  source 1..15: mol_type = other DNA
ccagccagcagtaag

SEQ ID NO: 18421 - DNA, 15 bp, synthetic construct
  source 1..15: mol_type = other DNA
tgaggtctatcagat

SEQ ID NO: 18422 - DNA, 15 bp, synthetic construct
  source 1..15: mol_type = other DNA
gtaaccactggtaag

SEQ ID NO: 18423 - DNA, 15 bp, synthetic construct
  source 1..15: mol_type = other DNA
aacaagactatctct

SEQ ID NO: 18424 - DNA, 15 bp, synthetic construct
  source 1..15: mol_type = other DNA
atggaagtagaagat

SEQ ID NO: 18425 - DNA, 15 bp, synthetic construct
  source 1..15: mol_type = other DNA
ttttcacgccatctt

SEQ ID NO: 18426 - DNA, 15 bp, synthetic construct
  source 1..15: mol_type = other DNA
agattccagcagaca

SEQ ID NO: 18427 - DNA, 15 bp, synthetic construct
  source 1..15: mol_type = other DNA
gggattgatatgttt

SEQ ID NO: 18428 - DNA, 15 bp, synthetic construct
  source 1..15: mol_type = other DNA
tagggtaaagtgcca

SEQ ID NO: 18429 - DNA, 15 bp, synthetic construct
  source 1..15: mol_type = other DNA
gacctgcttctattg

SEQ ID NO: 18430 - DNA, 15 bp, synthetic construct
  source 1..15: mol_type = other DNA
caaatgattatggaa

SEQ ID NO: 18431 - DNA, 15 bp, synthetic construct
  source 1..15: mol_type = other DNA
cctgtgattctttaa

SEQ ID NO: 18432 - DNA, 15 bp, synthetic construct
  source 1..15: mol_type = other DNA
tctgggtcacaacca

SEQ ID NO: 18433 - DNA, 15 bp, synthetic construct
  source 1..15: mol_type = other DNA
gcgtatctcaagact

SEQ ID NO: 18434 - DNA, 15 bp, synthetic construct
  source 1..15: mol_type = other DNA
taacacacattttta

SEQ ID NO: 18435 - DNA, 15 bp, synthetic construct
  source 1..15: mol_type = other DNA
ctgttgatgagtctt

SEQ ID NO: 18436 - DNA, 15 bp, synthetic construct
  source 1..15: mol_type = other DNA
agatttaaactcaga

SEQ ID NO: 18437 - DNA, 15 bp, synthetic construct
  source 1..15: mol_type = other DNA
agttaataaaaatga

SEQ ID NO: 18438 - DNA, 15 bp, synthetic construct
  source 1..15: mol_type = other DNA
atgtctgtcccaagg

SEQ ID NO: 18439 - DNA, 15 bp, synthetic construct
  source 1..15: mol_type = other DNA
catccacgtttcagg

SEQ ID NO: 18440 - DNA, 15 bp, synthetic construct
  source 1..15: mol_type = other DNA
cctgggataagagtt

SEQ ID NO: 18441 - DNA, 15 bp, synthetic construct
  source 1..15: mol_type = other DNA
caaccgcagctaaca

SEQ ID NO: 18442 - DNA, 15 bp, synthetic construct
  source 1..15: mol_type = other DNA
agcaaaagaaagagg

SEQ ID NO: 18443 - DNA, 15 bp, synthetic construct
  source 1..15: mol_type = other DNA
aatctcttcatacag

SEQ ID NO: 18444 - DNA, 15 bp, synthetic construct
  source 1..15: mol_type = other DNA
tctcctcataaaaac

SEQ ID NO: 18445 - DNA, 15 bp, synthetic construct
  source 1..15: mol_type = other DNA
caatgagattcaaac

SEQ ID NO: 18446 - DNA, 15 bp, synthetic construct
  source 1..15: mol_type = other DNA
aagggagactccatt

SEQ ID NO: 18447 - DNA, 15 bp, synthetic construct
  source 1..15: mol_type = other DNA
tctgaaaagaaggaa

SEQ ID NO: 18448 - DNA, 15 bp, synthetic construct
  source 1..15: mol_type = other DNA
ctagcccatgactgg

SEQ ID NO: 18449 - DNA, 15 bp, synthetic construct
  source 1..15: mol_type = other DNA
tcaggctctttgtca

SEQ ID NO: 18450 - DNA, 15 bp, synthetic construct
  source 1..15: mol_type = other DNA
tgtatcagacagcag

SEQ ID NO: 18451 - DNA, 15 bp, synthetic construct
  source 1..15: mol_type = other DNA
aaacaagacacactg

SEQ ID NO: 18452 - DNA, 15 bp, synthetic construct
  source 1..15: mol_type = other DNA
ctattttagatctgc

SEQ ID NO: 18453 - DNA, 15 bp, synthetic construct
  source 1..15: mol_type = other DNA
ttaatctgcattctt

SEQ ID NO: 18454 - DNA, 15 bp, synthetic construct
  source 1..15: mol_type = other DNA
gagtgtttctggtgt

SEQ ID NO: 18455 - DNA, 15 bp, synthetic construct
  source 1..15: mol_type = other DNA
cagcagtactctgag

SEQ ID NO: 18456 - DNA, 15 bp, synthetic construct
  source 1..15: mol_type = other DNA
agacccagtttgtcg

SEQ ID NO: 18457 - DNA, 15 bp, synthetic construct
  source 1..15: mol_type = other DNA
ctcattatcagggtg

SEQ ID NO: 18458 - DNA, 15 bp, synthetic construct
  source 1..15: mol_type = other DNA
gattcctagaaaaga

SEQ ID NO: 18459 - DNA, 15 bp, synthetic construct
  source 1..15: mol_type = other DNA
tgtctaaaatctgga

SEQ ID NO: 18460 - DNA, 15 bp, synthetic construct
  source 1..15: mol_type = other DNA
agttcagctgggcaa

SEQ ID NO: 18461 - DNA, 15 bp, synthetic construct
  source 1..15: mol_type = other DNA
ctcaccaacaacaca

SEQ ID NO: 18462 - DNA, 15 bp, synthetic construct
  source 1..15: mol_type = other DNA
acatagcagcatgcc

SEQ ID NO: 18463 - DNA, 15 bp, synthetic construct
  source 1..15: mol_type = other DNA
tcgcacggccttgga

SEQ ID NO: 18464 - DNA, 15 bp, synthetic construct
  source 1..15: mol_type = other DNA
ctcactccatgaaag

SEQ ID NO: 18465 - DNA, 15 bp, synthetic construct
  source 1..15: mol_type = other DNA
cagagctgctgtggg

SEQ ID NO: 18466 - DNA, 15 bp, synthetic construct
  source 1..15: mol_type = other DNA
gacggcttggaggtg

SEQ ID NO: 18467 - DNA, 15 bp, synthetic construct
  source 1..15: mol_type = other DNA
caggaatgtgactcc

SEQ ID NO: 18468 - DNA, 15 bp, synthetic construct
  source 1..15: mol_type = other DNA
ctgtaggccgctttg

SEQ ID NO: 18469 - DNA, 15 bp, synthetic construct
  source 1..15: mol_type = other DNA
cagtggtgatcctat

SEQ ID NO: 18470 - DNA, 15 bp, synthetic construct
  source 1..15: mol_type = other DNA
tgctatagtcagcgt

SEQ ID NO: 18471 - DNA, 15 bp, synthetic construct
  source 1..15: mol_type = other DNA
gcagtggaccttggc

SEQ ID NO: 18472 - DNA, 15 bp, synthetic construct
  source 1..15: mol_type = other DNA
cttcttgaggaagac

SEQ ID NO: 18473 - DNA, 15 bp, synthetic construct
  source 1..15: mol_type = other DNA
tgaaatctcttttct

SEQ ID NO: 18474 - DNA, 15 bp, synthetic construct
  source 1..15: mol_type = other DNA
ccgggatttgcaatt

SEQ ID NO: 18475 - DNA, 15 bp, synthetic construct
  source 1..15: mol_type = other DNA
ctctacgtcccataa

SEQ ID NO: 18476 - DNA, 15 bp, synthetic construct
  source 1..15: mol_type = other DNA
tcatcaaactgtact

SEQ ID NO: 18477 - DNA, 15 bp, synthetic construct
  source 1..15: mol_type = other DNA
tttgatgtcagtgtg

SEQ ID NO: 18478 - DNA, 15 bp, synthetic construct
  source 1..15: mol_type = other DNA
gatgtaaggcaccct

SEQ ID NO: 18479 - DNA, 15 bp, synthetic construct
  source 1..15: mol_type = other DNA
caggcatagggaaaa

SEQ ID NO: 18480 - DNA, 15 bp, synthetic construct
  source 1..15: mol_type = other DNA
tacatacaaaatcca

SEQ ID NO: 18481 - DNA, 15 bp, synthetic construct
  source 1..15: mol_type = other DNA
ctaaatgaagtgttt

SEQ ID NO: 18482 - DNA, 15 bp, synthetic construct
  source 1..15: mol_type = other DNA
tgaaggcatgaaggg

SEQ ID NO: 18483 - DNA, 15 bp, synthetic construct
  source 1..15: mol_type = other DNA
ttgcaaatgtagatg

SEQ ID NO: 18484 - DNA, 15 bp, synthetic construct
  source 1..15: mol_type = other DNA
ctaggtctggtgcct

SEQ ID NO: 18485 - DNA, 15 bp, synthetic construct
  source 1..15: mol_type = other DNA
aaatccaaagagagt

SEQ ID NO: 18486 - DNA, 15 bp, synthetic construct
  source 1..15: mol_type = other DNA
gtccgtgctcatgtc

SEQ ID NO: 18487 - DNA, 15 bp, synthetic construct
  source 1..15: mol_type = other DNA
aaatccaaagagagt

SEQ ID NO: 18488 - DNA, 15 bp, synthetic construct
  source 1..15: mol_type = other DNA
gtccgtgctcatgtc

SEQ ID NO: 18489 - DNA, 15 bp, synthetic construct
  source 1..15: mol_type = other DNA
cctattttcactcct

SEQ ID NO: 18490 - DNA, 15 bp, synthetic construct
  source 1..15: mol_type = other DNA
tcgaagcccttctcc

SEQ ID NO: 18491 - DNA, 15 bp, synthetic construct
  source 1..15: mol_type = other DNA
gtggatatgcagatg

SEQ ID NO: 18492 - DNA, 15 bp, synthetic construct
  source 1..15: mol_type = other DNA
gcattgtgtcatacg

SEQ ID NO: 18493 - DNA, 15 bp, synthetic construct
  source 1..15: mol_type = other DNA
acaggcagtgtgaaa

SEQ ID NO: 18494 - DNA, 15 bp, synthetic construct
  source 1..15: mol_type = other DNA
tgtggcttcaatgtg

SEQ ID NO: 18495 - DNA, 15 bp, synthetic construct
  source 1..15: mol_type = other DNA
tgtgtccttgaagac

SEQ ID NO: 18496 - DNA, 15 bp, synthetic construct
  source 1..15: mol_type = other DNA
agatgccaggattac

SEQ ID NO: 18497 - DNA, 15 bp, synthetic construct
  source 1..15: mol_type = other DNA
tatgccagcggaaga

SEQ ID NO: 18498 - DNA, 15 bp, synthetic construct
  source 1..15: mol_type = other DNA
tctaataacaaagat

SEQ ID NO: 18499 - DNA, 15 bp, synthetic construct
  source 1..15: mol_type = other DNA
ctactgctattattt

SEQ ID NO: 18500 - DNA, 15 bp, synthetic construct
  source 1..15: mol_type = other DNA
tatggatggctttgg

SEQ ID NO: 18501 - DNA, 30 bp, synthetic construct
  source 1..30: mol_type = other DNA
cagcacgcctcatatcagcacgcctcatat

SEQ ID NO: 18502 - DNA, 15 bp, synthetic construct
  source 1..15: mol_type = other DNA
taagcacagtatccc

SEQ ID NO: 18503 - DNA, 15 bp, synthetic construct
  source 1..15: mol_type = other DNA
tgaactgcagatatt

SEQ ID NO: 18504 - DNA, 15 bp, synthetic construct
  source 1..15: mol_type = other DNA
ttttgctcagtggga

SEQ ID NO: 18505 - DNA, 15 bp, synthetic construct
  source 1..15: mol_type = other DNA
cctgagcctaggaca

SEQ ID NO: 18506 - DNA, 15 bp, synthetic construct
  source 1..15: mol_type = other DNA
taggcatctttttgc

SEQ ID NO: 18507 - DNA, 15 bp, synthetic construct
  source 1..15: mol_type = other DNA
ttacgtccaggactt

SEQ ID NO: 18508 - DNA, 15 bp, synthetic construct
  source 1..15: mol_type = other DNA
gactcgtcccagttc

SEQ ID NO: 18509 - DNA, 15 bp, synthetic construct
  source 1..15: mol_type = other DNA
tcttgctttatccgg

SEQ ID NO: 18510 - DNA, 15 bp, synthetic construct
  source 1..15: mol_type = other DNA
atgcttgtcttgttc

SEQ ID NO: 18511 - DNA, 15 bp, synthetic construct
  source 1..15: mol_type = other DNA
agtgacaacagtaag

SEQ ID NO: 18512 - DNA, 15 bp, synthetic construct
  source 1..15: mol_type = other DNA
tgacaaatccttgat

SEQ ID NO: 18513 - DNA, 15 bp, synthetic construct
  source 1..15: mol_type = other DNA
agttacacatcacgt

SEQ ID NO: 18514 - DNA, 15 bp, synthetic construct
  source 1..15: mol_type = other DNA
ttgcactgtgaaata

SEQ ID NO: 18515 - DNA, 15 bp, synthetic construct
  source 1..15: mol_type = other DNA
cgagttggtgtatgt

SEQ ID NO: 18516 - DNA, 15 bp, synthetic construct
  source 1..15: mol_type = other DNA
cacagaatcggaaga

SEQ ID NO: 18517 - DNA, 15 bp, synthetic construct
  source 1..15: mol_type = other DNA
ggatccctcaccttg

SEQ ID NO: 18518 - DNA, 15 bp, synthetic construct
  source 1..15: mol_type = other DNA
caaaagtgctacctt

SEQ ID NO: 18519 - DNA, 15 bp, synthetic construct
  source 1..15: mol_type = other DNA
acatgcacgtcggag

SEQ ID NO: 18520 - DNA, 15 bp, synthetic construct
  source 1..15: mol_type = other DNA
tctctctgtaggaca

SEQ ID NO: 18521 - DNA, 15 bp, synthetic construct
  source 1..15: mol_type = other DNA
ggtcttgacatattg

SEQ ID NO: 18522 - DNA, 15 bp, synthetic construct
  source 1..15: mol_type = other DNA
ccttatttctgagca

SEQ ID NO: 18523 - DNA, 15 bp, synthetic construct
  source 1..15: mol_type = other DNA
ttagcacaaaagtta

SEQ ID NO: 18524 - DNA, 15 bp, synthetic construct
  source 1..15: mol_type = other DNA
aaagactttgtatcc

SEQ ID NO: 18525 - DNA, 15 bp, synthetic construct
  source 1..15: mol_type = other DNA
caggtgaaactattg

SEQ ID NO: 18526 - DNA, 15 bp, synthetic construct
  source 1..15: mol_type = other DNA
ttacatcctccccaa

SEQ ID NO: 18527 - DNA, 15 bp, synthetic construct
  source 1..15: mol_type = other DNA
cctcggatttcacgt

SEQ ID NO: 18528 - DNA, 15 bp, synthetic construct
  source 1..15: mol_type = other DNA
gctctccaagaccta

SEQ ID NO: 18529 - DNA, 15 bp, synthetic construct
  source 1..15: mol_type = other DNA
agagcctcggcgtag

SEQ ID NO: 18530 - DNA, 15 bp, synthetic construct
  source 1..15: mol_type = other DNA
tgcaaggcgttcttc

SEQ ID NO: 18531 - DNA, 15 bp, synthetic construct
  source 1..15: mol_type = other DNA
tctcgtaccaggtca

SEQ ID NO: 18532 - DNA, 15 bp, synthetic construct
  source 1..15: mol_type = other DNA
caagttcgtctactt

SEQ ID NO: 18533 - DNA, 15 bp, synthetic construct
  source 1..15: mol_type = other DNA
acgaagctggcgtag

SEQ ID NO: 18534 - DNA, 15 bp, synthetic construct
  source 1..15: mol_type = other DNA
acaaggtctggttcg

SEQ ID NO: 18535 - DNA, 15 bp, synthetic construct
  source 1..15: mol_type = other DNA
agtacatgcacgtct

SEQ ID NO: 18536 - DNA, 15 bp, synthetic construct
  source 1..15: mol_type = other DNA
aaccgctacctcaat

SEQ ID NO: 18537 - DNA, 15 bp, synthetic construct
  source 1..15: mol_type = other DNA
cgagcttgcggatga

SEQ ID NO: 18538 - DNA, 15 bp, synthetic construct
  source 1..15: mol_type = other DNA
ttccgggagtacctg

SEQ ID NO: 18539 - DNA, 15 bp, synthetic construct
  source 1..15: mol_type = other DNA
tccatggtctcgaag

SEQ ID NO: 18540 - DNA, 15 bp, synthetic construct
  source 1..15: mol_type = other DNA
agccggtccatatga

SEQ ID NO: 18541 - DNA, 15 bp, synthetic construct
  source 1..15: mol_type = other DNA
tctggtccatattga

SEQ ID NO: 18542 - DNA, 15 bp, synthetic construct
  source 1..15: mol_type = other DNA
agccgtccgcactac

SEQ ID NO: 18543 - DNA, 15 bp, synthetic construct
  source 1..15: mol_type = other DNA
cacctcctggatctc

SEQ ID NO: 18544 - DNA, 15 bp, synthetic construct
  source 1..15: mol_type = other DNA
cggtccaatatagcg

SEQ ID NO: 18545 - DNA, 15 bp, synthetic construct
  source 1..15: mol_type = other DNA
tccttagcaaataat

SEQ ID NO: 18546 - DNA, 15 bp, synthetic construct
  source 1..15: mol_type = other DNA
catgagctaattgta

SEQ ID NO: 18547 - DNA, 15 bp, synthetic construct
  source 1..15: mol_type = other DNA
aatcagcaggtttgc

SEQ ID NO: 18548 - DNA, 15 bp, synthetic construct
  source 1..15: mol_type = other DNA
ggagtcacttctact

SEQ ID NO: 18549 - DNA, 15 bp, synthetic construct
  source 1..15: mol_type = other DNA
agatttctaatacca

SEQ ID NO: 18550 - DNA, 15 bp, synthetic construct
  source 1..15: mol_type = other DNA
ataaaaccaagtcct

SEQ ID NO: 18551 - DNA, 15 bp, synthetic construct
  source 1..15: mol_type = other DNA
tcctccatgcgtaac

SEQ ID NO: 18552 - DNA, 15 bp, synthetic construct
  source 1..15: mol_type = other DNA
agtaaaactgtgcat

SEQ ID NO: 18553 - DNA, 15 bp, synthetic construct
  source 1..15: mol_type = other DNA
tcatctgtcacgttt

SEQ ID NO: 18554 - DNA, 15 bp, synthetic construct
  source 1..15: mol_type = other DNA
gaaaacactgcttta

SEQ ID NO: 18555 - DNA, 15 bp, synthetic construct
  source 1..15: mol_type = other DNA
taggctgcggattcc

SEQ ID NO: 18556 - DNA, 15 bp, synthetic construct
  source 1..15: mol_type = other DNA
gccaggcggctgaac

SEQ ID NO: 18557 - DNA, 15 bp, synthetic construct
  source 1..15: mol_type = other DNA
gctgtggaccttcgc

SEQ ID NO: 18558 - DNA, 15 bp, synthetic construct
  source 1..15: mol_type = other DNA
ccgtgtctactagga

SEQ ID NO: 18559 - DNA, 15 bp, synthetic construct
  source 1..15: mol_type = other DNA
ttagatgacattggt

SEQ ID NO: 18560 - DNA, 15 bp, synthetic construct
  source 1..15: mol_type = other DNA
ctggcctattaatcc

SEQ ID NO: 18561 - DNA, 15 bp, synthetic construct
  source 1..15: mol_type = other DNA
aaggaacacaaaaga

SEQ ID NO: 18562 - DNA, 15 bp, synthetic construct
  source 1..15: mol_type = other DNA
tagccaactgtgatc

SEQ ID NO: 18563 - DNA, 15 bp, synthetic construct
  source 1..15: mol_type = other DNA
tgcaaacattcagtg

SEQ ID NO: 18564 - DNA, 15 bp, synthetic construct
  source 1..15: mol_type = other DNA
gccatggtcacgttc

SEQ ID NO: 18565 - DNA, 15 bp, synthetic construct
  source 1..15: mol_type = other DNA
tacctcaccgacagc

SEQ ID NO: 18566 - DNA, 15 bp, synthetic construct
  source 1..15: mol_type = other DNA
acctcttctatccag

SEQ ID NO: 18567 - DNA, 15 bp, synthetic construct
  source 1..15: mol_type = other DNA
aacttttctggagtc

SEQ ID NO: 18568 - DNA, 15 bp, synthetic construct
  source 1..15: mol_type = other DNA
taggtcttcctcagt

SEQ ID NO: 18569 - DNA, 15 bp, synthetic construct
  source 1..15: mol_type = other DNA
catctccttctataa

SEQ ID NO: 18570 - DNA, 15 bp, synthetic construct
  source 1..15: mol_type = other DNA
atcctccaggagaaa

SEQ ID NO: 18571 - DNA, 15 bp, synthetic construct
  source 1..15: mol_type = other DNA
ctaaaatctaaagct

SEQ ID NO: 18572 - DNA, 15 bp, synthetic construct
  source 1..15: mol_type = other DNA
cctttacctgaatca

SEQ ID NO: 18573 - DNA, 15 bp, synthetic construct
  source 1..15: mol_type = other DNA
ttctcttgtgtttca

SEQ ID NO: 18574 - DNA, 15 bp, synthetic construct
  source 1..15: mol_type = other DNA
cccacctgggagtaa

SEQ ID NO: 18575 - DNA, 15 bp, synthetic construct
  source 1..15: mol_type = other DNA
tttgaggtggaatgg

SEQ ID NO: 18576 - DNA, 15 bp, synthetic construct
  source 1..15: mol_type = other DNA
taggatgagttgtaa

SEQ ID NO: 18577 - DNA, 15 bp, synthetic construct
  source 1..15: mol_type = other DNA
ctcattccatgttac

SEQ ID NO: 18578 - DNA, 15 bp, synthetic construct
  source 1..15: mol_type = other DNA
tggagaaatgagtat

SEQ ID NO: 18579 - DNA, 15 bp, synthetic construct
  source 1..15: mol_type = other DNA
attaatgttgcagtt

SEQ ID NO: 18580 - DNA, 15 bp, synthetic construct
  source 1..15: mol_type = other DNA
cgagtgtctatgatg

SEQ ID NO: 18581 - DNA, 15 bp, synthetic construct
  source 1..15: mol_type = other DNA
gtgaggatttcattt

SEQ ID NO: 18582 - DNA, 15 bp, synthetic construct
  source 1..15: mol_type = other DNA
cacagtagacgagtt

SEQ ID NO: 18583 - DNA, 15 bp, synthetic construct
  source 1..15: mol_type = other DNA
tacctgctgtcatgg

SEQ ID NO: 18584 - DNA, 15 bp, synthetic construct
  source 1..15: mol_type = other DNA
tgtgaaattccttac

SEQ ID NO: 18585 - DNA, 15 bp, synthetic construct
  source 1..15: mol_type = other DNA
cactaacctttatct

SEQ ID NO: 18586 - DNA, 15 bp, synthetic construct
  source 1..15: mol_type = other DNA
caaaagtcagcacag

SEQ ID NO: 18587 - DNA, 15 bp, synthetic construct
  source 1..15: mol_type = other DNA
ccagctcctacatca

SEQ ID NO: 18588 - DNA, 15 bp, synthetic construct
  source 1..15: mol_type = other DNA
tgtgattcacaacca

SEQ ID NO: 18589 - DNA, 15 bp, synthetic construct
  source 1..15: mol_type = other DNA
gtttaggtgaccagg

SEQ ID NO: 18590 - DNA, 15 bp, synthetic construct
  source 1..15: mol_type = other DNA
taacacttggtagag

SEQ ID NO: 18591 - DNA, 15 bp, synthetic construct
  source 1..15: mol_type = other DNA
ctgttgtttttacat

SEQ ID NO: 18592 - DNA, 15 bp, synthetic construct
  source 1..15: mol_type = other DNA
gggtagcaaaggata

SEQ ID NO: 18593 - DNA, 15 bp, synthetic construct
  source 1..15: mol_type = other DNA
aatgttttgttttat

SEQ ID NO: 18594 - DNA, 15 bp, synthetic construct
  source 1..15: mol_type = other DNA
accaattcaaaatgt

SEQ ID NO: 18595 - DNA, 15 bp, synthetic construct
  source 1..15: mol_type = other DNA
gcattctgagaaagc

SEQ ID NO: 18596 - DNA, 15 bp, synthetic construct
  source 1..15: mol_type = other DNA
catgactctcagatc

SEQ ID NO: 18597 - DNA, 15 bp, synthetic construct
  source 1..15: mol_type = other DNA
catgatgaattatta

SEQ ID NO: 18598 - DNA, 15 bp, synthetic construct
  source 1..15: mol_type = other DNA
ggaggaaggataata

SEQ ID NO: 18599 - DNA, 15 bp, synthetic construct
  source 1..15: mol_type = other DNA
gattcctccctctga

SEQ ID NO: 18600 - DNA, 15 bp, synthetic construct
  source 1..15: mol_type = other DNA
acaccaggattggaa

SEQ ID NO: 18601 - DNA, 15 bp, synthetic construct
  source 1..15: mol_type = other DNA
aacagataggagata

SEQ ID NO: 18602 - DNA, 15 bp, synthetic construct
  source 1..15: mol_type = other DNA
catgaccttccacat

SEQ ID NO: 18603 - DNA, 15 bp, synthetic construct
  source 1..15: mol_type = other DNA
tgtaggatctcaggt

SEQ ID NO: 18604 - DNA, 15 bp, synthetic construct
  source 1..15: mol_type = other DNA
gggtgagaagtcaaa

SEQ ID NO: 18605 - DNA, 15 bp, synthetic construct
  source 1..15: mol_type = other DNA
cgggacgatgactct

SEQ ID NO: 18606 - DNA, 15 bp, synthetic construct
  source 1..15: mol_type = other DNA
gggtctcgcgacccg

SEQ ID NO: 18607 - DNA, 15 bp, synthetic construct
  source 1..15: mol_type = other DNA
tggagagacggtcag

SEQ ID NO: 18608 - DNA, 15 bp, synthetic construct
  source 1..15: mol_type = other DNA
tggcggtgaagatgt

SEQ ID NO: 18609 - DNA, 15 bp, synthetic construct
  source 1..15: mol_type = other DNA
cggaggaggacaagc

SEQ ID NO: 18610 - DNA, 15 bp, synthetic construct
  source 1..15: mol_type = other DNA
gacaggaacggatgg

SEQ ID NO: 18611 - DNA, 15 bp, synthetic construct
  source 1..15: mol_type = other DNA
gctttctggtggatg

SEQ ID NO: 18612 - DNA, 15 bp, synthetic construct
  source 1..15: mol_type = other DNA
ctacttggcagagtc

SEQ ID NO: 18613 - DNA, 15 bp, synthetic construct
  source 1..15: mol_type = other DNA
cttcgagcatcagta

SEQ ID NO: 18614 - DNA, 15 bp, synthetic construct
  source 1..15: mol_type = other DNA
tggtccctccatccg

SEQ ID NO: 18615 - DNA, 15 bp, synthetic construct
  source 1..15: mol_type = other DNA
tgggtgctgtgtccc

SEQ ID NO: 18616 - DNA, 15 bp, synthetic construct
  source 1..15: mol_type = other DNA
atgagcctctcagtg

SEQ ID NO: 18617 - DNA, 15 bp, synthetic construct
  source 1..15: mol_type = other DNA
ccgttctaagagtgg

SEQ ID NO: 18618 - DNA, 15 bp, synthetic construct
  source 1..15: mol_type = other DNA
ggatgtcacgttctc

SEQ ID NO: 18619 - DNA, 15 bp, synthetic construct
  source 1..15: mol_type = other DNA
tcaggatggtggatg

SEQ ID NO: 18620 - DNA, 15 bp, synthetic construct
  source 1..15: mol_type = other DNA
cctcgttgtccgact

SEQ ID NO: 18621 - DNA, 15 bp, synthetic construct
  source 1..15: mol_type = other DNA
cgaatacgaccaagt

SEQ ID NO: 18622 - DNA, 15 bp, synthetic construct
  source 1..15: mol_type = other DNA
atgacggaggagttc

SEQ ID NO: 18623 - DNA, 15 bp, synthetic construct
  source 1..15: mol_type = other DNA
cgaatacgaccaagt

SEQ ID NO: 18624 - DNA, 15 bp, synthetic construct
  source 1..15: mol_type = other DNA
atgacggaggagttc

SEQ ID NO: 18625 - DNA, 15 bp, synthetic construct
  source 1..15: mol_type = other DNA
ctacccctggttcca

SEQ ID NO: 18626 - DNA, 15 bp, synthetic construct
  source 1..15: mol_type = other DNA
cactcccatacatga

SEQ ID NO: 18627 - DNA, 15 bp, synthetic construct
  source 1..15: mol_type = other DNA
ttactcgctcatccc

SEQ ID NO: 18628 - DNA, 15 bp, synthetic construct
  source 1..15: mol_type = other DNA
gtgtgagtagatgat

SEQ ID NO: 18629 - DNA, 15 bp, synthetic construct
  source 1..15: mol_type = other DNA
cctgaagatgttcgt

SEQ ID NO: 18630 - DNA, 15 bp, synthetic construct
  source 1..15: mol_type = other DNA
ccgtggaaggaaggt

SEQ ID NO: 18631 - DNA, 15 bp, synthetic construct
  source 1..15: mol_type = other DNA
taggatggagctgag

SEQ ID NO: 18632 - DNA, 15 bp, synthetic construct
  source 1..15: mol_type = other DNA
catcatcgggaagga

SEQ ID NO: 18633 - DNA, 15 bp, synthetic construct
  source 1..15: mol_type = other DNA
tggcattcgtcctcc

SEQ ID NO: 18634 - DNA, 15 bp, synthetic construct
  source 1..15: mol_type = other DNA
aacactacctcatgt

SEQ ID NO: 18635 - DNA, 15 bp, synthetic construct
  source 1..15: mol_type = other DNA
tggcattcgtcctcc

SEQ ID NO: 18636 - DNA, 15 bp, synthetic construct
  source 1..15: mol_type = other DNA
aacactacctcatgt

SEQ ID NO: 18637 - DNA, 15 bp, synthetic construct
  source 1..15: mol_type = other DNA
ccccagaaatcggag

SEQ ID NO: 18638 - DNA, 15 bp, synthetic construct
  source 1..15: mol_type = other DNA
ccaatgactttgacg

SEQ ID NO: 18639 - DNA, 15 bp, synthetic construct
  source 1..15: mol_type = other DNA
ccccagaaatcggag

SEQ ID NO: 18640 - DNA, 15 bp, synthetic construct
  source 1..15: mol_type = other DNA
ccaatgactttgacg

SEQ ID NO: 18641 - DNA, 15 bp, synthetic construct
  source 1..15: mol_type = other DNA
tggtctgctcaatgg

SEQ ID NO: 18642 - DNA, 15 bp, synthetic construct
  source 1..15: mol_type = other DNA
gttgtgtgtgtaatg

SEQ ID NO: 18643 - DNA, 15 bp, synthetic construct
  source 1..15: mol_type = other DNA
taaacatgcgtgacc

SEQ ID NO: 18644 - DNA, 15 bp, synthetic construct
  source 1..15: mol_type = other DNA
aaggagtgggactta

SEQ ID NO: 18645 - DNA, 15 bp, synthetic construct
  source 1..15: mol_type = other DNA
gtcccactccttatc

SEQ ID NO: 18646 - DNA, 15 bp, synthetic construct
  source 1..15: mol_type = other DNA
ctgtacccggttcta

SEQ ID NO: 18647 - DNA, 15 bp, synthetic construct
  source 1..15: mol_type = other DNA
tcagctttccatcct

SEQ ID NO: 18648 - DNA, 15 bp, synthetic construct
  source 1..15: mol_type = other DNA
gagttgagagtctaa

SEQ ID NO: 18649 - DNA, 15 bp, synthetic construct
  source 1..15: mol_type = other DNA
tcatagatccttggg

SEQ ID NO: 18650 - DNA, 15 bp, synthetic construct
  source 1..15: mol_type = other DNA
atgactgtctagctt

SEQ ID NO: 18651 - DNA, 15 bp, synthetic construct
  source 1..15: mol_type = other DNA
taggcgtagaccttg

SEQ ID NO: 18652 - DNA, 15 bp, synthetic construct
  source 1..15: mol_type = other DNA
gtctaggaagaaaag

SEQ ID NO: 18653 - DNA, 15 bp, synthetic construct
  source 1..15: mol_type = other DNA
agaagatgctgggtt

SEQ ID NO: 18654 - DNA, 15 bp, synthetic construct
  source 1..15: mol_type = other DNA
gtatgagctggacaa

SEQ ID NO: 18655 - DNA, 15 bp, synthetic construct
  source 1..15: mol_type = other DNA
tgagggtgttcctat

SEQ ID NO: 18656 - DNA, 15 bp, synthetic construct
  source 1..15: mol_type = other DNA
atgccactatgtcta

SEQ ID NO: 18657 - DNA, 15 bp, synthetic construct
  source 1..15: mol_type = other DNA
tgagggtgttcctat

SEQ ID NO: 18658 - DNA, 15 bp, synthetic construct
  source 1..15: mol_type = other DNA
atgccactatgtcta

SEQ ID NO: 18659 - DNA, 15 bp, synthetic construct
  source 1..15: mol_type = other DNA
gtcatcatggatatg

SEQ ID NO: 18660 - DNA, 15 bp, synthetic construct
  source 1..15: mol_type = other DNA
ttaatcaccttgacc

SEQ ID NO: 18661 - DNA, 15 bp, synthetic construct
  source 1..15: mol_type = other DNA
agatagagggatggc

SEQ ID NO: 18662 - DNA, 15 bp, synthetic construct
  source 1..15: mol_type = other DNA
caaggtcaccataaa

SEQ ID NO: 18663 - DNA, 15 bp, synthetic construct
  source 1..15: mol_type = other DNA
agatagagggatggc

SEQ ID NO: 18664 - DNA, 15 bp, synthetic construct
  source 1..15: mol_type = other DNA
caaggtcaccataaa

SEQ ID NO: 18665 - DNA, 15 bp, synthetic construct
  source 1..15: mol_type = other DNA
atctcaaggatcata

SEQ ID NO: 18666 - DNA, 15 bp, synthetic construct
  source 1..15: mol_type = other DNA
gtggtgacaatgtac

SEQ ID NO: 18667 - DNA, 15 bp, synthetic construct
  source 1..15: mol_type = other DNA
atctcaaggatcata

SEQ ID NO: 18668 - DNA, 15 bp, synthetic construct
  source 1..15: mol_type = other DNA
gtggtgacaatgtac

SEQ ID NO: 18669 - DNA, 15 bp, synthetic construct
  source 1..15: mol_type = other DNA
tgagttgatctttgg

SEQ ID NO: 18670 - DNA, 15 bp, synthetic construct
  source 1..15: mol_type = other DNA
cttctctcttttcac

SEQ ID NO: 18671 - DNA, 15 bp, synthetic construct
  source 1..15: mol_type = other DNA
tgagttgatctttgg

SEQ ID NO: 18672 - DNA, 15 bp, synthetic construct
  source 1..15: mol_type = other DNA
cttctctcttttcac

SEQ ID NO: 18673 - DNA, 15 bp, synthetic construct
  source 1..15: mol_type = other DNA
gcttcccagtaaacc

SEQ ID NO: 18674 - DNA, 15 bp, synthetic construct
  source 1..15: mol_type = other DNA
catctttctctcttg

SEQ ID NO: 18675 - DNA, 15 bp, synthetic construct
  source 1..15: mol_type = other DNA
ctcaactccactgca

SEQ ID NO: 18676 - DNA, 15 bp, synthetic construct
  source 1..15: mol_type = other DNA
ctaaaagactttgac

SEQ ID NO: 18677 - DNA, 15 bp, synthetic construct
  source 1..15: mol_type = other DNA
tcattgagccaacgc

SEQ ID NO: 18678 - DNA, 15 bp, synthetic construct
  source 1..15: mol_type = other DNA
gcctcgaatgtcagc

SEQ ID NO: 18679 - DNA, 15 bp, synthetic construct
  source 1..15: mol_type = other DNA
tcagcttggcttagg

SEQ ID NO: 18680 - DNA, 15 bp, synthetic construct
  source 1..15: mol_type = other DNA
ctaaagcaggagact

SEQ ID NO: 18681 - DNA, 15 bp, synthetic construct
  source 1..15: mol_type = other DNA
gtaggatctctgtag

SEQ ID NO: 18682 - DNA, 15 bp, synthetic construct
  source 1..15: mol_type = other DNA
tgcagcaacaaggca

SEQ ID NO: 18683 - DNA, 15 bp, synthetic construct
  source 1..15: mol_type = other DNA
catgactgcagtgat

SEQ ID NO: 18684 - DNA, 15 bp, synthetic construct
  source 1..15: mol_type = other DNA
ttacggaacaacaac

SEQ ID NO: 18685 - DNA, 15 bp, synthetic construct
  source 1..15: mol_type = other DNA
tctttagcctcctgc

SEQ ID NO: 18686 - DNA, 15 bp, synthetic construct
  source 1..15: mol_type = other DNA
aaattgttgcatgaa

SEQ ID NO: 18687 - DNA, 15 bp, synthetic construct
  source 1..15: mol_type = other DNA
attttgccctaaatc

SEQ ID NO: 18688 - DNA, 15 bp, synthetic construct
  source 1..15: mol_type = other DNA
ggcagtctctggatc

SEQ ID NO: 18689 - DNA, 15 bp, synthetic construct
  source 1..15: mol_type = other DNA
taaggatgcttaatg

SEQ ID NO: 18690 - DNA, 15 bp, synthetic construct
  source 1..15: mol_type = other DNA
cttctctgcagggta

SEQ ID NO: 18691 - DNA, 15 bp, synthetic construct
  source 1..15: mol_type = other DNA
tgcccgtttcacgaa

SEQ ID NO: 18692 - DNA, 15 bp, synthetic construct
  source 1..15: mol_type = other DNA
ctcctcgttctgatc

SEQ ID NO: 18693 - DNA, 15 bp, synthetic construct
  source 1..15: mol_type = other DNA
gaggtgggatcttag

SEQ ID NO: 18694 - DNA, 15 bp, synthetic construct
  source 1..15: mol_type = other DNA
aacatgatcggcatg

SEQ ID NO: 18695 - DNA, 15 bp, synthetic construct
  source 1..15: mol_type = other DNA
ccaggtaatgcacag

SEQ ID NO: 18696 - DNA, 15 bp, synthetic construct
  source 1..15: mol_type = other DNA
ggaacccttttcacg

SEQ ID NO: 18697 - DNA, 15 bp, synthetic construct
  source 1..15: mol_type = other DNA
ggtgcgggttaaaca

SEQ ID NO: 18698 - DNA, 15 bp, synthetic construct
  source 1..15: mol_type = other DNA
ttagtgaggtaggat

SEQ ID NO: 18699 - DNA, 15 bp, synthetic construct
  source 1..15: mol_type = other DNA
actaaacccaggtca

SEQ ID NO: 18700 - DNA, 15 bp, synthetic construct
  source 1..15: mol_type = other DNA
tagggtgatcctaag

SEQ ID NO: 18701 - DNA, 15 bp, synthetic construct
  source 1..15: mol_type = other DNA
caaatttcctaagct

SEQ ID NO: 18702 - DNA, 15 bp, synthetic construct
  source 1..15: mol_type = other DNA
tcctcgttgtccgtt

SEQ ID NO: 18703 - DNA, 15 bp, synthetic construct
  source 1..15: mol_type = other DNA
cggcacgatgacata

SEQ ID NO: 18704 - DNA, 15 bp, synthetic construct
  source 1..15: mol_type = other DNA
ccgagccgttctcta

SEQ ID NO: 18705 - DNA, 15 bp, synthetic construct
  source 1..15: mol_type = other DNA
cggcacgatgacata

SEQ ID NO: 18706 - DNA, 15 bp, synthetic construct
  source 1..15: mol_type = other DNA
ccgagccgttctcta

SEQ ID NO: 18707 - DNA, 15 bp, synthetic construct
  source 1..15: mol_type = other DNA
ttgtggagtagttcc

SEQ ID NO: 18708 - DNA, 15 bp, synthetic construct
  source 1..15: mol_type = other DNA
gtaatgcaggacttc

SEQ ID NO: 18709 - DNA, 15 bp, synthetic construct
  source 1..15: mol_type = other DNA
ttgtggagtagttcc

SEQ ID NO: 18710 - DNA, 15 bp, synthetic construct
  source 1..15: mol_type = other DNA
gtaatgcaggacttc

SEQ ID NO: 18711 - DNA, 15 bp, synthetic construct
  source 1..15: mol_type = other DNA
acctgctcgtttcga

SEQ ID NO: 18712 - DNA, 15 bp, synthetic construct
  source 1..15: mol_type = other DNA
atctgtcatttgtcg

SEQ ID NO: 18713 - DNA, 15 bp, synthetic construct
  source 1..15: mol_type = other DNA
tgacactcagacacc

SEQ ID NO: 18714 - DNA, 15 bp, synthetic construct
  source 1..15: mol_type = other DNA
gatgacatctcctaa

SEQ ID NO: 18715 - DNA, 15 bp, synthetic construct
  source 1..15: mol_type = other DNA
attccagagaagacc

SEQ ID NO: 18716 - DNA, 15 bp, synthetic construct
  source 1..15: mol_type = other DNA
ctaaatgcagatcta

SEQ ID NO: 18717 - DNA, 15 bp, synthetic construct
  source 1..15: mol_type = other DNA
acaggagtctcctcc

SEQ ID NO: 18718 - DNA, 15 bp, synthetic construct
  source 1..15: mol_type = other DNA
cccgcagtcggcaag

SEQ ID NO: 18719 - DNA, 15 bp, synthetic construct
  source 1..15: mol_type = other DNA
tcgcagcacttgcgc

SEQ ID NO: 18720 - DNA, 15 bp, synthetic construct
  source 1..15: mol_type = other DNA
acgccgttccgtgca

SEQ ID NO: 18721 - DNA, 15 bp, synthetic construct
  source 1..15: mol_type = other DNA
tcgcagcacttgcgc

SEQ ID NO: 18722 - DNA, 15 bp, synthetic construct
  source 1..15: mol_type = other DNA
acgccgttccgtgca

SEQ ID NO: 18723 - DNA, 15 bp, synthetic construct
  source 1..15: mol_type = other DNA
gctcccacctttgtc

SEQ ID NO: 18724 - DNA, 15 bp, synthetic construct
  source 1..15: mol_type = other DNA
cacctagtaaatccc

SEQ ID NO: 18725 - DNA, 15 bp, synthetic construct
  source 1..15: mol_type = other DNA
tgctcccatttgatg

SEQ ID NO: 18726 - DNA, 15 bp, synthetic construct
  source 1..15: mol_type = other DNA
gtgggaaggattacg

SEQ ID NO: 18727 - DNA, 15 bp, synthetic construct
  source 1..15: mol_type = other DNA
tgctcgtgaaggtca

SEQ ID NO: 18728 - DNA, 15 bp, synthetic construct
  source 1..15: mol_type = other DNA
tgggaagagatacac

SEQ ID NO: 18729 - DNA, 15 bp, synthetic construct
  source 1..15: mol_type = other DNA
tcagcttcaaccatc

SEQ ID NO: 18730 - DNA, 15 bp, synthetic construct
  source 1..15: mol_type = other DNA
tgaccctgaagatag

SEQ ID NO: 18731 - DNA, 15 bp, synthetic construct
  source 1..15: mol_type = other DNA
cttattcagcacgaa

SEQ ID NO: 18732 - DNA, 15 bp, synthetic construct
  source 1..15: mol_type = other DNA
gtctttccactctag

SEQ ID NO: 18733 - DNA, 15 bp, synthetic construct
  source 1..15: mol_type = other DNA
acagttgagagacag

SEQ ID NO: 18734 - DNA, 15 bp, synthetic construct
  source 1..15: mol_type = other DNA
tactacacgctgatc

SEQ ID NO: 18735 - DNA, 15 bp, synthetic construct
  source 1..15: mol_type = other DNA
gtccttgacgtccac

SEQ ID NO: 18736 - DNA, 15 bp, synthetic construct
  source 1..15: mol_type = other DNA
gaacaagggcaggct

SEQ ID NO: 18737 - DNA, 15 bp, synthetic construct
  source 1..15: mol_type = other DNA
aagtcggtggtgatg

SEQ ID NO: 18738 - DNA, 15 bp, synthetic construct
  source 1..15: mol_type = other DNA
ggccaagatccgcta

SEQ ID NO: 18739 - DNA, 15 bp, synthetic construct
  source 1..15: mol_type = other DNA
aagtcggtggtgatg

SEQ ID NO: 18740 - DNA, 15 bp, synthetic construct
  source 1..15: mol_type = other DNA
ggccaagatccgcta

SEQ ID NO: 18741 - DNA, 15 bp, synthetic construct
  source 1..15: mol_type = other DNA
accaggtaggtgtag

SEQ ID NO: 18742 - DNA, 15 bp, synthetic construct
  source 1..15: mol_type = other DNA
aagcaggagctctcg

SEQ ID NO: 18743 - DNA, 15 bp, synthetic construct
  source 1..15: mol_type = other DNA
ggtaattgttggagt

SEQ ID NO: 18744 - DNA, 15 bp, synthetic construct
  source 1..15: mol_type = other DNA
aatccaggataatga

SEQ ID NO: 18745 - DNA, 15 bp, synthetic construct
  source 1..15: mol_type = other DNA
tatgcagatgagaat

SEQ ID NO: 18746 - DNA, 15 bp, synthetic construct
  source 1..15: mol_type = other DNA
tgacgaaccctgatg

SEQ ID NO: 18747 - DNA, 15 bp, synthetic construct
  source 1..15: mol_type = other DNA
gggttagagactgca

SEQ ID NO: 18748 - DNA, 15 bp, synthetic construct
  source 1..15: mol_type = other DNA
tccacttcaccaaga

SEQ ID NO: 18749 - DNA, 15 bp, synthetic construct
  source 1..15: mol_type = other DNA
gggttagagactgca

SEQ ID NO: 18750 - DNA, 15 bp, synthetic construct
  source 1..15: mol_type = other DNA
tccacttcaccaaga

SEQ ID NO: 18751 - DNA, 15 bp, synthetic construct
  source 1..15: mol_type = other DNA
tgaagtacttgggtg

SEQ ID NO: 18752 - DNA, 15 bp, synthetic construct
  source 1..15: mol_type = other DNA
aagtggactctactc

SEQ ID NO: 18753 - DNA, 15 bp, synthetic construct
  source 1..15: mol_type = other DNA
aaccccactttcact

SEQ ID NO: 18754 - DNA, 15 bp, synthetic construct
  source 1..15: mol_type = other DNA
cccttctcagattga

SEQ ID NO: 18755 - DNA, 15 bp, synthetic construct
  source 1..15: mol_type = other DNA
cgtacaaagacttcc

SEQ ID NO: 18756 - DNA, 15 bp, synthetic construct
  source 1..15: mol_type = other DNA
attccggtaccatag

SEQ ID NO: 18757 - DNA, 15 bp, synthetic construct
  source 1..15: mol_type = other DNA
cggcctccgtctatg

SEQ ID NO: 18758 - DNA, 15 bp, synthetic construct
  source 1..15: mol_type = other DNA
ccaggagggatggac

SEQ ID NO: 18759 - DNA, 15 bp, synthetic construct
  source 1..15: mol_type = other DNA
cacctggctcttacc

SEQ ID NO: 18760 - DNA, 15 bp, synthetic construct
  source 1..15: mol_type = other DNA
tcaccacagcaggtc

SEQ ID NO: 18761 - DNA, 15 bp, synthetic construct
  source 1..15: mol_type = other DNA
cacctggctcttacc

SEQ ID NO: 18762 - DNA, 15 bp, synthetic construct
  source 1..15: mol_type = other DNA
tcaccacagcaggtc

SEQ ID NO: 18763 - DNA, 15 bp, synthetic construct
  source 1..15: mol_type = other DNA
tactccttcacctca

SEQ ID NO: 18764 - DNA, 15 bp, synthetic construct
  source 1..15: mol_type = other DNA
tcttctcagaaccag

SEQ ID NO: 18765 - DNA, 15 bp, synthetic construct
  source 1..15: mol_type = other DNA
tactccttcacctca

SEQ ID NO: 18766 - DNA, 15 bp, synthetic construct
  source 1..15: mol_type = other DNA
tcttctcagaaccag

SEQ ID NO: 18767 - DNA, 15 bp, synthetic construct
  source 1..15: mol_type = other DNA
gctcggatcttccac

SEQ ID NO: 18768 - DNA, 15 bp, synthetic construct
  source 1..15: mol_type = other DNA
tatcctctatccttc

SEQ ID NO: 18769 - DNA, 15 bp, synthetic construct
  source 1..15: mol_type = other DNA
gctcggatcttccac

SEQ ID NO: 18770 - DNA, 15 bp, synthetic construct
  source 1..15: mol_type = other DNA
tatcctctatccttc

SEQ ID NO: 18771 - DNA, 15 bp, synthetic construct
  source 1..15: mol_type = other DNA
gcctctcctaagcct

SEQ ID NO: 18772 - DNA, 15 bp, synthetic construct
  source 1..15: mol_type = other DNA
cgggtacctcttcat

SEQ ID NO: 18773 - DNA, 15 bp, synthetic construct
  source 1..15: mol_type = other DNA
gcctctcctaagcct

SEQ ID NO: 18774 - DNA, 15 bp, synthetic construct
  source 1..15: mol_type = other DNA
cgggtacctcttcat

SEQ ID NO: 18775 - DNA, 15 bp, synthetic construct
  source 1..15: mol_type = other DNA
ggtcttgtctgtctg

SEQ ID NO: 18776 - DNA, 15 bp, synthetic construct
  source 1..15: mol_type = other DNA
ataatgggcaggcaa

SEQ ID NO: 18777 - DNA, 15 bp, synthetic construct
  source 1..15: mol_type = other DNA
tcctgcgccagtctg

SEQ ID NO: 18778 - DNA, 15 bp, synthetic construct
  source 1..15: mol_type = other DNA
gcgtctcacatccgt

SEQ ID NO: 18779 - DNA, 15 bp, synthetic construct
  source 1..15: mol_type = other DNA
accctgaattctaca

SEQ ID NO: 18780 - DNA, 15 bp, synthetic construct
  source 1..15: mol_type = other DNA
aaaagccagctccag

SEQ ID NO: 18781 - DNA, 15 bp, synthetic construct
  source 1..15: mol_type = other DNA
cacttggagctggag

SEQ ID NO: 18782 - DNA, 15 bp, synthetic construct
  source 1..15: mol_type = other DNA
ccccaatgtcagatg

SEQ ID NO: 18783 - DNA, 15 bp, synthetic construct
  source 1..15: mol_type = other DNA
gccgaggatgatgta

SEQ ID NO: 18784 - DNA, 15 bp, synthetic construct
  source 1..15: mol_type = other DNA
ctaccaggccagcca

SEQ ID NO: 18785 - DNA, 15 bp, synthetic construct
  source 1..15: mol_type = other DNA
agagacccacccatc

SEQ ID NO: 18786 - DNA, 15 bp, synthetic construct
  source 1..15: mol_type = other DNA
gcgtgagtctccaac

SEQ ID NO: 18787 - DNA, 15 bp, synthetic construct
  source 1..15: mol_type = other DNA
catcctgcaaagtat

SEQ ID NO: 18788 - DNA, 15 bp, synthetic construct
  source 1..15: mol_type = other DNA
gacgttgtcaaagcc

SEQ ID NO: 18789 - DNA, 15 bp, synthetic construct
  source 1..15: mol_type = other DNA
acgttgacatctgcc

SEQ ID NO: 18790 - DNA, 15 bp, synthetic construct
  source 1..15: mol_type = other DNA
cataatcctgttcct

SEQ ID NO: 18791 - DNA, 15 bp, synthetic construct
  source 1..15: mol_type = other DNA
gatgtcataaagtag

SEQ ID NO: 18792 - DNA, 15 bp, synthetic construct
  source 1..15: mol_type = other DNA
aggtgtctgcaaggt

SEQ ID NO: 18793 - DNA, 15 bp, synthetic construct
  source 1..15: mol_type = other DNA
ataatagggctgtag

SEQ ID NO: 18794 - DNA, 15 bp, synthetic construct
  source 1..15: mol_type = other DNA
gatggacgagacgtg

SEQ ID NO: 18795 - DNA, 15 bp, synthetic construct
  source 1..15: mol_type = other DNA
tagagccgcctcgtc

SEQ ID NO: 18796 - DNA, 15 bp, synthetic construct
  source 1..15: mol_type = other DNA
ggcctacaccacagt

SEQ ID NO: 18797 - DNA, 15 bp, synthetic construct
  source 1..15: mol_type = other DNA
gcgatgttgaccacg

SEQ ID NO: 18798 - DNA, 15 bp, synthetic construct
  source 1..15: mol_type = other DNA
tcgttttccaggaca

SEQ ID NO: 18799 - DNA, 15 bp, synthetic construct
  source 1..15: mol_type = other DNA
gaggatgaggagagg

SEQ ID NO: 18800 - DNA, 15 bp, synthetic construct
  source 1..15: mol_type = other DNA
tgtgagtgacgtggt

SEQ ID NO: 18801 - DNA, 15 bp, synthetic construct
  source 1..15: mol_type = other DNA
tggctggtcccctaa

SEQ ID NO: 18802 - DNA, 15 bp, synthetic construct
  source 1..15: mol_type = other DNA
caaacacggaggagg

SEQ ID NO: 18803 - DNA, 15 bp, synthetic construct
  source 1..15: mol_type = other DNA
cctacccagaaaact

SEQ ID NO: 18804 - DNA, 15 bp, synthetic construct
  source 1..15: mol_type = other DNA
tgagtcgtcatccga

SEQ ID NO: 18805 - DNA, 15 bp, synthetic construct
  source 1..15: mol_type = other DNA
ttgtctgagatgttc

SEQ ID NO: 18806 - DNA, 15 bp, synthetic construct
  source 1..15: mol_type = other DNA
caccatttctcatcc

SEQ ID NO: 18807 - DNA, 15 bp, synthetic construct
  source 1..15: mol_type = other DNA
gcaaggagctcagaa

SEQ ID NO: 18808 - DNA, 15 bp, synthetic construct
  source 1..15: mol_type = other DNA
ctctcacagcacctc

SEQ ID NO: 18809 - DNA, 15 bp, synthetic construct
  source 1..15: mol_type = other DNA
catgatagatcgcac

SEQ ID NO: 18810 - DNA, 15 bp, synthetic construct
  source 1..15: mol_type = other DNA
cctgagaagagcaca

SEQ ID NO: 18811 - DNA, 15 bp, synthetic construct
  source 1..15: mol_type = other DNA
catgatagatcgcac

SEQ ID NO: 18812 - DNA, 15 bp, synthetic construct
  source 1..15: mol_type = other DNA
cctgagaagagcaca

SEQ ID NO: 18813 - DNA, 15 bp, synthetic construct
  source 1..15: mol_type = other DNA
gccagactccgaact

SEQ ID NO: 18814 - DNA, 15 bp, synthetic construct
  source 1..15: mol_type = other DNA
cagacactcatttcc

SEQ ID NO: 18815 - DNA, 15 bp, synthetic construct
  source 1..15: mol_type = other DNA
agccatgggaagaaa

SEQ ID NO: 18816 - DNA, 15 bp, synthetic construct
  source 1..15: mol_type = other DNA
ccagcaacgtccata

SEQ ID NO: 18817 - DNA, 15 bp, synthetic construct
  source 1..15: mol_type = other DNA
tctgtgatgctaatc

SEQ ID NO: 18818 - DNA, 15 bp, synthetic construct
  source 1..15: mol_type = other DNA
ccgcgtggatacagt

SEQ ID NO: 18819 - DNA, 15 bp, synthetic construct
  source 1..15: mol_type = other DNA
ccgtggcccttctac

SEQ ID NO: 18820 - DNA, 15 bp, synthetic construct
  source 1..15: mol_type = other DNA
aaggtcgctgtgctg

SEQ ID NO: 18821 - DNA, 15 bp, synthetic construct
  source 1..15: mol_type = other DNA
gcagcgccttcttga

SEQ ID NO: 18822 - DNA, 15 bp, synthetic construct
  source 1..15: mol_type = other DNA
ccaggaggaaaagcg

SEQ ID NO: 18823 - DNA, 15 bp, synthetic construct
  source 1..15: mol_type = other DNA
gctcttaagttgtac

SEQ ID NO: 18824 - DNA, 15 bp, synthetic construct
  source 1..15: mol_type = other DNA
acagcctccctggtg

SEQ ID NO: 18825 - DNA, 15 bp, synthetic construct
  source 1..15: mol_type = other DNA
actccgtggtgtcgg

SEQ ID NO: 18826 - DNA, 15 bp, synthetic construct
  source 1..15: mol_type = other DNA
gcctattcctactgc

SEQ ID NO: 18827 - DNA, 15 bp, synthetic construct
  source 1..15: mol_type = other DNA
catactgagggtaga

SEQ ID NO: 18828 - DNA, 15 bp, synthetic construct
  source 1..15: mol_type = other DNA
cgatccaccctactc

SEQ ID NO: 18829 - DNA, 15 bp, synthetic construct
  source 1..15: mol_type = other DNA
ggcggtagccatagg

SEQ ID NO: 18830 - DNA, 15 bp, synthetic construct
  source 1..15: mol_type = other DNA
gtcctggtgtttctc

SEQ ID NO: 18831 - DNA, 15 bp, synthetic construct
  source 1..15: mol_type = other DNA
cctctaattgttggg

SEQ ID NO: 18832 - DNA, 15 bp, synthetic construct
  source 1..15: mol_type = other DNA
tccccaggtaagcct

SEQ ID NO: 18833 - DNA, 15 bp, synthetic construct
  source 1..15: mol_type = other DNA
gacttggctacaaga

SEQ ID NO: 18834 - DNA, 15 bp, synthetic construct
  source 1..15: mol_type = other DNA
ccaaagactgaaaac

SEQ ID NO: 18835 - DNA, 15 bp, synthetic construct
  source 1..15: mol_type = other DNA
tcctcctgggacgag

SEQ ID NO: 18836 - DNA, 15 bp, synthetic construct
  source 1..15: mol_type = other DNA
ctggctccaatcatc

SEQ ID NO: 18837 - DNA, 15 bp, synthetic construct
  source 1..15: mol_type = other DNA
taatataaacagcac

SEQ ID NO: 18838 - DNA, 15 bp, synthetic construct
  source 1..15: mol_type = other DNA
atgggtacccatgac

SEQ ID NO: 18839 - DNA, 15 bp, synthetic construct
  source 1..15: mol_type = other DNA
aagccactcgtgact

SEQ ID NO: 18840 - DNA, 15 bp, synthetic construct
  source 1..15: mol_type = other DNA
tcttcggtcttctgt

SEQ ID NO: 18841 - DNA, 15 bp, synthetic construct
  source 1..15: mol_type = other DNA
ggactctttctatat

SEQ ID NO: 18842 - DNA, 15 bp, synthetic construct
  source 1..15: mol_type = other DNA
cccgtgtcgttattt

SEQ ID NO: 18843 - DNA, 15 bp, synthetic construct
  source 1..15: mol_type = other DNA
tcccttctctggatt

SEQ ID NO: 18844 - DNA, 15 bp, synthetic construct
  source 1..15: mol_type = other DNA
ggtgaccgtgttctc

SEQ ID NO: 18845 - DNA, 15 bp, synthetic construct
  source 1..15: mol_type = other DNA
gtggaacgatccaag

SEQ ID NO: 18846 - DNA, 15 bp, synthetic construct
  source 1..15: mol_type = other DNA
agtagataagagact

SEQ ID NO: 18847 - DNA, 15 bp, synthetic construct
  source 1..15: mol_type = other DNA
ccgtccgtgaatatc

SEQ ID NO: 18848 - DNA, 15 bp, synthetic construct
  source 1..15: mol_type = other DNA
attatcatcgggatc

SEQ ID NO: 18849 - DNA, 15 bp, synthetic construct
  source 1..15: mol_type = other DNA
cggtgaagtaggaca

SEQ ID NO: 18850 - DNA, 15 bp, synthetic construct
  source 1..15: mol_type = other DNA
agcattctcatttga

SEQ ID NO: 18851 - DNA, 15 bp, synthetic construct
  source 1..15: mol_type = other DNA
acccagggaaatagc

SEQ ID NO: 18852 - DNA, 15 bp, synthetic construct
  source 1..15: mol_type = other DNA
tgcaggagaattttt

SEQ ID NO: 18853 - DNA, 15 bp, synthetic construct
  source 1..15: mol_type = other DNA
ctcattgttttccat

SEQ ID NO: 18854 - DNA, 15 bp, synthetic construct
  source 1..15: mol_type = other DNA
cccgtggagatacac

SEQ ID NO: 18855 - DNA, 15 bp, synthetic construct
  source 1..15: mol_type = other DNA
ggagatgggctcgtg

SEQ ID NO: 18856 - DNA, 15 bp, synthetic construct
  source 1..15: mol_type = other DNA
gaaaaccataaatgc

SEQ ID NO: 18857 - DNA, 15 bp, synthetic construct
  source 1..15: mol_type = other DNA
aggtcttttctgacc

SEQ ID NO: 18858 - DNA, 15 bp, synthetic construct
  source 1..15: mol_type = other DNA
ggcacaatgatcacc

SEQ ID NO: 18859 - DNA, 15 bp, synthetic construct
  source 1..15: mol_type = other DNA
aggtagggatactct

SEQ ID NO: 18860 - DNA, 15 bp, synthetic construct
  source 1..15: mol_type = other DNA
ttggcacatgtatgg

SEQ ID NO: 18861 - DNA, 15 bp, synthetic construct
  source 1..15: mol_type = other DNA
acctgtttgccatac

SEQ ID NO: 18862 - DNA, 15 bp, synthetic construct
  source 1..15: mol_type = other DNA
ggcatctccatcatc

SEQ ID NO: 18863 - DNA, 15 bp, synthetic construct
  source 1..15: mol_type = other DNA
gagccaatgatggtg

SEQ ID NO: 18864 - DNA, 15 bp, synthetic construct
  source 1..15: mol_type = other DNA
cgataattaatcacg

SEQ ID NO: 18865 - DNA, 15 bp, synthetic construct
  source 1..15: mol_type = other DNA
aagtaagtccagaga

SEQ ID NO: 18866 - DNA, 15 bp, synthetic construct
  source 1..15: mol_type = other DNA
tgagaagtcgatcca

SEQ ID NO: 18867 - DNA, 15 bp, synthetic construct
  source 1..15: mol_type = other DNA
gactggtggtcttag

SEQ ID NO: 18868 - DNA, 15 bp, synthetic construct
  source 1..15: mol_type = other DNA
aacactgtgcttttg

SEQ ID NO: 18869 - DNA, 15 bp, synthetic construct
  source 1..15: mol_type = other DNA
tcgcctccaggattc

SEQ ID NO: 18870 - DNA, 15 bp, synthetic construct
  source 1..15: mol_type = other DNA
agagtaaggatgttc

SEQ ID NO: 18871 - DNA, 15 bp, synthetic construct
  source 1..15: mol_type = other DNA
atctgggctgacttg

SEQ ID NO: 18872 - DNA, 15 bp, synthetic construct
  source 1..15: mol_type = other DNA
ggactggtacacacg

SEQ ID NO: 18873 - DNA, 15 bp, synthetic construct
  source 1..15: mol_type = other DNA
tcacagacttccacc

SEQ ID NO: 18874 - DNA, 15 bp, synthetic construct
  source 1..15: mol_type = other DNA
tctaggcgggaggaa

SEQ ID NO: 18875 - DNA, 15 bp, synthetic construct
  source 1..15: mol_type = other DNA
gataagaagtccatc

SEQ ID NO: 18876 - DNA, 15 bp, synthetic construct
  source 1..15: mol_type = other DNA
tctcacttttccaat

SEQ ID NO: 18877 - DNA, 15 bp, synthetic construct
  source 1..15: mol_type = other DNA
gagaccagtggagtg

SEQ ID NO: 18878 - DNA, 15 bp, synthetic construct
  source 1..15: mol_type = other DNA
ccagatcttcaatga

SEQ ID NO: 18879 - DNA, 15 bp, synthetic construct
  source 1..15: mol_type = other DNA
ttgctgatgcaaagc

SEQ ID NO: 18880 - DNA, 15 bp, synthetic construct
  source 1..15: mol_type = other DNA
tcttattcccgaggt

SEQ ID NO: 18881 - DNA, 15 bp, synthetic construct
  source 1..15: mol_type = other DNA
ttgctgatgcaaagc

SEQ ID NO: 18882 - DNA, 15 bp, synthetic construct
  source 1..15: mol_type = other DNA
tcttattcccgaggt

SEQ ID NO: 18883 - DNA, 15 bp, synthetic construct
  source 1..15: mol_type = other DNA
ttcacctgtgaaacc

SEQ ID NO: 18884 - DNA, 15 bp, synthetic construct
  source 1..15: mol_type = other DNA
tttgtttgttttgcg

SEQ ID NO: 18885 - DNA, 15 bp, synthetic construct
  source 1..15: mol_type = other DNA
ttcacctgtgaaacc

SEQ ID NO: 18886 - DNA, 15 bp, synthetic construct
  source 1..15: mol_type = other DNA
tttgtttgttttgcg

SEQ ID NO: 18887 - DNA, 15 bp, synthetic construct
  source 1..15: mol_type = other DNA
acctgatgctaacgg

SEQ ID NO: 18888 - DNA, 15 bp, synthetic construct
  source 1..15: mol_type = other DNA
gaaggctctgaggga

SEQ ID NO: 18889 - DNA, 15 bp, synthetic construct
  source 1..15: mol_type = other DNA
gctctcctcatattc

SEQ ID NO: 18890 - DNA, 15 bp, synthetic construct
  source 1..15: mol_type = other DNA
actgagccctttatt

SEQ ID NO: 18891 - DNA, 15 bp, synthetic construct
  source 1..15: mol_type = other DNA
gctctcctcatattc

SEQ ID NO: 18892 - DNA, 15 bp, synthetic construct
  source 1..15: mol_type = other DNA
actgagccctttatt

SEQ ID NO: 18893 - DNA, 15 bp, synthetic construct
  source 1..15: mol_type = other DNA
agtatgcagcaacca

SEQ ID NO: 18894 - DNA, 15 bp, synthetic construct
  source 1..15: mol_type = other DNA
ctgggattcactgag

SEQ ID NO: 18895 - DNA, 15 bp, synthetic construct
  source 1..15: mol_type = other DNA
ctaagtcgttaagca

SEQ ID NO: 18896 - DNA, 15 bp, synthetic construct
  source 1..15: mol_type = other DNA
atgaatctaataggc

SEQ ID NO: 18897 - DNA, 15 bp, synthetic construct
  source 1..15: mol_type = other DNA
ctctgaggaatactc

SEQ ID NO: 18898 - DNA, 15 bp, synthetic construct
  source 1..15: mol_type = other DNA
ccctgaatttactat

SEQ ID NO: 18899 - DNA, 15 bp, synthetic construct
  source 1..15: mol_type = other DNA
agggaagtgccctag

SEQ ID NO: 18900 - DNA, 15 bp, synthetic construct
  source 1..15: mol_type = other DNA
agggaaaacctggac

SEQ ID NO: 18901 - DNA, 15 bp, synthetic construct
  source 1..15: mol_type = other DNA
gtttcagaaacatgg

SEQ ID NO: 18902 - DNA, 15 bp, synthetic construct
  source 1..15: mol_type = other DNA
tctctctaggtacac

SEQ ID NO: 18903 - DNA, 15 bp, synthetic construct
  source 1..15: mol_type = other DNA
tgctgacaagttgaa

SEQ ID NO: 18904 - DNA, 15 bp, synthetic construct
  source 1..15: mol_type = other DNA
agataggcagacggt

SEQ ID NO: 18905 - DNA, 15 bp, synthetic construct
  source 1..15: mol_type = other DNA
ctcaaccattcactc

SEQ ID NO: 18906 - DNA, 15 bp, synthetic construct
  source 1..15: mol_type = other DNA
ctaactaaggtggct

SEQ ID NO: 18907 - DNA, 15 bp, synthetic construct
  source 1..15: mol_type = other DNA
tgaaaacgatgttgg

SEQ ID NO: 18908 - DNA, 15 bp, synthetic construct
  source 1..15: mol_type = other DNA
tgtcagatgtgggta

SEQ ID NO: 18909 - DNA, 15 bp, synthetic construct
  source 1..15: mol_type = other DNA
tcaacatgagctatg

SEQ ID NO: 18910 - DNA, 15 bp, synthetic construct
  source 1..15: mol_type = other DNA
acatggagaagatat

SEQ ID NO: 18911 - DNA, 15 bp, synthetic construct
  source 1..15: mol_type = other DNA
aatgcactggtaagc

SEQ ID NO: 18912 - DNA, 15 bp, synthetic construct
  source 1..15: mol_type = other DNA
acctctgtggagggt

SEQ ID NO: 18913 - DNA, 15 bp, synthetic construct
  source 1..15: mol_type = other DNA
ctctattcaccaaag

SEQ ID NO: 18914 - DNA, 15 bp, synthetic construct
  source 1..15: mol_type = other DNA
ctggaacccctaaga

SEQ ID NO: 18915 - DNA, 15 bp, synthetic construct
  source 1..15: mol_type = other DNA
acaatgaggagactc

SEQ ID NO: 18916 - DNA, 15 bp, synthetic construct
  source 1..15: mol_type = other DNA
aggtcccttattctg

SEQ ID NO: 18917 - DNA, 15 bp, synthetic construct
  source 1..15: mol_type = other DNA
gaataagggacctgg

SEQ ID NO: 18918 - DNA, 15 bp, synthetic construct
  source 1..15: mol_type = other DNA
accctaaccttaaca

SEQ ID NO: 18919 - DNA, 15 bp, synthetic construct
  source 1..15: mol_type = other DNA
tagggtcaagaaggc

SEQ ID NO: 18920 - DNA, 15 bp, synthetic construct
  source 1..15: mol_type = other DNA
ctggctccgctcgca

SEQ ID NO: 18921 - DNA, 15 bp, synthetic construct
  source 1..15: mol_type = other DNA
ctggagaggcactag

SEQ ID NO: 18922 - DNA, 15 bp, synthetic construct
  source 1..15: mol_type = other DNA
ccgcccctaacctct

SEQ ID NO: 18923 - DNA, 15 bp, synthetic construct
  source 1..15: mol_type = other DNA
tggtctgcgtccacc

SEQ ID NO: 18924 - DNA, 15 bp, synthetic construct
  source 1..15: mol_type = other DNA
ccttctcccgagagc

SEQ ID NO: 18925 - DNA, 15 bp, synthetic construct
  source 1..15: mol_type = other DNA
ttggcctggttgtcc

SEQ ID NO: 18926 - DNA, 15 bp, synthetic construct
  source 1..15: mol_type = other DNA
cagaaaaaggctttg

SEQ ID NO: 18927 - DNA, 15 bp, synthetic construct
  source 1..15: mol_type = other DNA
attgcccaagattct

SEQ ID NO: 18928 - DNA, 15 bp, synthetic construct
  source 1..15: mol_type = other DNA
aaaagtcattcttcc

SEQ ID NO: 18929 - DNA, 15 bp, synthetic construct
  source 1..15: mol_type = other DNA
tctctgtgctgggtc

SEQ ID NO: 18930 - DNA, 15 bp, synthetic construct
  source 1..15: mol_type = other DNA
ctagcacgatggata

SEQ ID NO: 18931 - DNA, 15 bp, synthetic construct
  source 1..15: mol_type = other DNA
tatccacgagtcatg

SEQ ID NO: 18932 - DNA, 15 bp, synthetic construct
  source 1..15: mol_type = other DNA
agtgccattattatc

SEQ ID NO: 18933 - DNA, 15 bp, synthetic construct
  source 1..15: mol_type = other DNA
gtcacgttcttgttc

SEQ ID NO: 18934 - DNA, 15 bp, synthetic construct
  source 1..15: mol_type = other DNA
ctggatgccaaagat

SEQ ID NO: 18935 - DNA, 15 bp, synthetic construct
  source 1..15: mol_type = other DNA
atccagtaggcataa

SEQ ID NO: 18936 - DNA, 15 bp, synthetic construct
  source 1..15: mol_type = other DNA
gctggtgatgaccgt

SEQ ID NO: 18937 - DNA, 15 bp, synthetic construct
  source 1..15: mol_type = other DNA
acaggtgacctgcag

SEQ ID NO: 18938 - DNA, 15 bp, synthetic construct
  source 1..15: mol_type = other DNA
aggtgagggcaaacg

SEQ ID NO: 18939 - DNA, 15 bp, synthetic construct
  source 1..15: mol_type = other DNA
ggagacagggacagg

SEQ ID NO: 18940 - DNA, 15 bp, synthetic construct
  source 1..15: mol_type = other DNA
agagtggatgggcta

SEQ ID NO: 18941 - DNA, 15 bp, synthetic construct
  source 1..15: mol_type = other DNA
ctgaatttccataat

SEQ ID NO: 18942 - DNA, 15 bp, synthetic construct
  source 1..15: mol_type = other DNA
atttcagatgatgac

SEQ ID NO: 18943 - DNA, 15 bp, synthetic construct
  source 1..15: mol_type = other DNA
ccagatgttcatacc

SEQ ID NO: 18944 - DNA, 15 bp, synthetic construct
  source 1..15: mol_type = other DNA
agaatctatcttgcg

SEQ ID NO: 18945 - DNA, 15 bp, synthetic construct
  source 1..15: mol_type = other DNA
ctggtcaggaacaca

SEQ ID NO: 18946 - DNA, 15 bp, synthetic construct
  source 1..15: mol_type = other DNA
ttcaagtccttctca

SEQ ID NO: 18947 - DNA, 15 bp, synthetic construct
  source 1..15: mol_type = other DNA
gaagcccagactcat

SEQ ID NO: 18948 - DNA, 15 bp, synthetic construct
  source 1..15: mol_type = other DNA
aggtaccgcctggaa

SEQ ID NO: 18949 - DNA, 15 bp, synthetic construct
  source 1..15: mol_type = other DNA
gaagcccagactcat

SEQ ID NO: 18950 - DNA, 15 bp, synthetic construct
  source 1..15: mol_type = other DNA
aggtaccgcctggaa

SEQ ID NO: 18951 - DNA, 15 bp, synthetic construct
  source 1..15: mol_type = other DNA
tctcaggctctgatc

SEQ ID NO: 18952 - DNA, 15 bp, synthetic construct
  source 1..15: mol_type = other DNA
cttgcaccgcgctgt

SEQ ID NO: 18953 - DNA, 15 bp, synthetic construct
  source 1..15: mol_type = other DNA
gtctagggaaggtaa

SEQ ID NO: 18954 - DNA, 15 bp, synthetic construct
  source 1..15: mol_type = other DNA
aacggaaagagataa

SEQ ID NO: 18955 - DNA, 15 bp, synthetic construct
  source 1..15: mol_type = other DNA
ttttctggtttggca

SEQ ID NO: 18956 - DNA, 15 bp, synthetic construct
  source 1..15: mol_type = other DNA
gccgtactggtacga

SEQ ID NO: 18957 - DNA, 15 bp, synthetic construct
  source 1..15: mol_type = other DNA
gaatggtggactacc

SEQ ID NO: 18958 - DNA, 15 bp, synthetic construct
  source 1..15: mol_type = other DNA
cacagacgctccagt

SEQ ID NO: 18959 - DNA, 15 bp, synthetic construct
  source 1..15: mol_type = other DNA
atcggccatgtacgg

SEQ ID NO: 18960 - DNA, 15 bp, synthetic construct
  source 1..15: mol_type = other DNA
tgatatgacctccag

SEQ ID NO: 18961 - DNA, 15 bp, synthetic construct
  source 1..15: mol_type = other DNA
ggacttccgagacgg

SEQ ID NO: 18962 - DNA, 15 bp, synthetic construct
  source 1..15: mol_type = other DNA
agagtctcctctgtt

SEQ ID NO: 18963 - DNA, 15 bp, synthetic construct
  source 1..15: mol_type = other DNA
tgcacggtggtctga

SEQ ID NO: 18964 - DNA, 15 bp, synthetic construct
  source 1..15: mol_type = other DNA
tgcacggtggtctga

SEQ ID NO: 18965 - DNA, 15 bp, synthetic construct
  source 1..15: mol_type = other DNA
ccagcgctttgttca

SEQ ID NO: 18966 - DNA, 15 bp, synthetic construct
  source 1..15: mol_type = other DNA
acttctcttcaggat

SEQ ID NO: 18967 - DNA, 15 bp, synthetic construct
  source 1..15: mol_type = other DNA
cctttctctagatgg

SEQ ID NO: 18968 - DNA, 15 bp, synthetic construct
  source 1..15: mol_type = other DNA
cagctctcctctaac

SEQ ID NO: 18969 - DNA, 15 bp, synthetic construct
  source 1..15: mol_type = other DNA
gagggtttatttttg

SEQ ID NO: 18970 - DNA, 15 bp, synthetic construct
  source 1..15: mol_type = other DNA
ggttcctagaggaaa

SEQ ID NO: 18971 - DNA, 15 bp, synthetic construct
  source 1..15: mol_type = other DNA
tgaatgggaattagt

SEQ ID NO: 18972 - DNA, 15 bp, synthetic construct
  source 1..15: mol_type = other DNA
gtgacccggagttag

SEQ ID NO: 18973 - DNA, 15 bp, synthetic construct
  source 1..15: mol_type = other DNA
tgggaattgaattta

SEQ ID NO: 18974 - DNA, 15 bp, synthetic construct
  source 1..15: mol_type = other DNA
cagccacttcgaagg

SEQ ID NO: 18975 - DNA, 15 bp, synthetic construct
  source 1..15: mol_type = other DNA
gacgaccctgtcacc

SEQ ID NO: 18976 - DNA, 15 bp, synthetic construct
  source 1..15: mol_type = other DNA
tcagcccttcttgct

SEQ ID NO: 18977 - DNA, 15 bp, synthetic construct
  source 1..15: mol_type = other DNA
tggcctcattttaat

SEQ ID NO: 18978 - DNA, 15 bp, synthetic construct
  source 1..15: mol_type = other DNA
attatggccttctcg

SEQ ID NO: 18979 - DNA, 15 bp, synthetic construct
  source 1..15: mol_type = other DNA
tgcagacatcgtgaa

SEQ ID NO: 18980 - DNA, 15 bp, synthetic construct
  source 1..15: mol_type = other DNA
gtgagctaaggctga

SEQ ID NO: 18981 - DNA, 15 bp, synthetic construct
  source 1..15: mol_type = other DNA
tctgtgaggagttcc

SEQ ID NO: 18982 - DNA, 15 bp, synthetic construct
  source 1..15: mol_type = other DNA
gctgaggataatgag

SEQ ID NO: 18983 - DNA, 15 bp, synthetic construct
  source 1..15: mol_type = other DNA
tagcaggaatcgtgg

SEQ ID NO: 18984 - DNA, 15 bp, synthetic construct
  source 1..15: mol_type = other DNA
gtagtcgcggaagtc

SEQ ID NO: 18985 - DNA, 15 bp, synthetic construct
  source 1..15: mol_type = other DNA
tatccaggagatgca

SEQ ID NO: 18986 - DNA, 15 bp, synthetic construct
  source 1..15: mol_type = other DNA
gattacgctggccaa

SEQ ID NO: 18987 - DNA, 15 bp, synthetic construct
  source 1..15: mol_type = other DNA
tcccttggagacatc

SEQ ID NO: 18988 - DNA, 15 bp, synthetic construct
  source 1..15: mol_type = other DNA
ggccgtaccgtcagt

SEQ ID NO: 18989 - DNA, 15 bp, synthetic construct
  source 1..15: mol_type = other DNA
gctgaatgagatccg

SEQ ID NO: 18990 - DNA, 15 bp, synthetic construct
  source 1..15: mol_type = other DNA
ctctaaagcagcatt

SEQ ID NO: 18991 - DNA, 15 bp, synthetic construct
  source 1..15: mol_type = other DNA
ggtctaagcgtctct

SEQ ID NO: 18992 - DNA, 15 bp, synthetic construct
  source 1..15: mol_type = other DNA
gccaggtgatgatag

SEQ ID NO: 18993 - DNA, 15 bp, synthetic construct
  source 1..15: mol_type = other DNA
catctagccacttgc

SEQ ID NO: 18994 - DNA, 15 bp, synthetic construct
  source 1..15: mol_type = other DNA
ggtctggacactatc

SEQ ID NO: 18995 - DNA, 15 bp, synthetic construct
  source 1..15: mol_type = other DNA
tgttctctgactcct

SEQ ID NO: 18996 - DNA, 15 bp, synthetic construct
  source 1..15: mol_type = other DNA
caatctcctcgatgg

SEQ ID NO: 18997 - DNA, 15 bp, synthetic construct
  source 1..15: mol_type = other DNA
ccacacactagaaaa

SEQ ID NO: 18998 - DNA, 15 bp, synthetic construct
  source 1..15: mol_type = other DNA
tgaactggtcatggg

SEQ ID NO: 18999 - DNA, 15 bp, synthetic construct
  source 1..15: mol_type = other DNA
ccacacactagaaaa

SEQ ID NO: 19000 - DNA, 15 bp, synthetic construct
  source 1..15: mol_type = other DNA
tgaactggtcatggg

SEQ ID NO: 19001 - DNA, 15 bp, synthetic construct
  source 1..15: mol_type = other DNA
ccaagagcctctgtg

SEQ ID NO: 19002 - DNA, 15 bp, synthetic construct
  source 1..15: mol_type = other DNA
ctcccacttggagtt

SEQ ID NO: 19003 - DNA, 15 bp, synthetic construct
  source 1..15: mol_type = other DNA
tcaccccgcaaatca

SEQ ID NO: 19004 - DNA, 15 bp, synthetic construct
  source 1..15: mol_type = other DNA
ctcacctccatcttg

SEQ ID NO: 19005 - DNA, 15 bp, synthetic construct
  source 1..15: mol_type = other DNA
tcaccccgcaaatca

SEQ ID NO: 19006 - DNA, 15 bp, synthetic construct
  source 1..15: mol_type = other DNA
ctcacctccatcttg

SEQ ID NO: 19007 - DNA, 15 bp, synthetic construct
  source 1..15: mol_type = other DNA
ccacaccgcgtctcc

SEQ ID NO: 19008 - DNA, 15 bp, synthetic construct
  source 1..15: mol_type = other DNA
accccctcactacgg

SEQ ID NO: 19009 - DNA, 15 bp, synthetic construct
  source 1..15: mol_type = other DNA
ctccctgtcattgtc

SEQ ID NO: 19010 - DNA, 15 bp, synthetic construct
  source 1..15: mol_type = other DNA
tcccgttcatctcaa

SEQ ID NO: 19011 - DNA, 15 bp, synthetic construct
  source 1..15: mol_type = other DNA
cccgtaggagatcgg

SEQ ID NO: 19012 - DNA, 15 bp, synthetic construct
  source 1..15: mol_type = other DNA
tctcactggcccgaa

SEQ ID NO: 19013 - DNA, 15 bp, synthetic construct
  source 1..15: mol_type = other DNA
cacttactgtggaga

SEQ ID NO: 19014 - DNA, 15 bp, synthetic construct
  source 1..15: mol_type = other DNA
gttctccacctcgtt

SEQ ID NO: 19015 - DNA, 15 bp, synthetic construct
  source 1..15: mol_type = other DNA
ccgcagcacatccgc

SEQ ID NO: 19016 - DNA, 15 bp, synthetic construct
  source 1..15: mol_type = other DNA
atgggaatggacgaa

SEQ ID NO: 19017 - DNA, 15 bp, synthetic construct
  source 1..15: mol_type = other DNA
ttgcctctaactctg

SEQ ID NO: 19018 - DNA, 15 bp, synthetic construct
  source 1..15: mol_type = other DNA
gagcagttaatgcca

SEQ ID NO: 19019 - DNA, 15 bp, synthetic construct
  source 1..15: mol_type = other DNA
gccctactctctcgg

SEQ ID NO: 19020 - DNA, 15 bp, synthetic construct
  source 1..15: mol_type = other DNA
aaggaagcgatgacc

SEQ ID NO: 19021 - DNA, 15 bp, synthetic construct
  source 1..15: mol_type = other DNA
tgtcgcgggagacca

SEQ ID NO: 19022 - DNA, 15 bp, synthetic construct
  source 1..15: mol_type = other DNA
gcgatgcagtactcg

SEQ ID NO: 19023 - DNA, 15 bp, synthetic construct
  source 1..15: mol_type = other DNA
tgtcgcgggagacca

SEQ ID NO: 19024 - DNA, 15 bp, synthetic construct
  source 1..15: mol_type = other DNA
gcgatgcagtactcg

SEQ ID NO: 19025 - DNA, 15 bp, synthetic construct
  source 1..15: mol_type = other DNA
ttcatcacagctgag

SEQ ID NO: 19026 - DNA, 15 bp, synthetic construct
  source 1..15: mol_type = other DNA
acagagtggaggaat

SEQ ID NO: 19027 - DNA, 15 bp, synthetic construct
  source 1..15: mol_type = other DNA
tcaatgataacaggg

SEQ ID NO: 19028 - DNA, 15 bp, synthetic construct
  source 1..15: mol_type = other DNA
gtacatcggccccaa

SEQ ID NO: 19029 - DNA, 15 bp, synthetic construct
  source 1..15: mol_type = other DNA
gggtgggttcttagc

SEQ ID NO: 19030 - DNA, 15 bp, synthetic construct
  source 1..15: mol_type = other DNA
aaccagcagaaggtg

SEQ ID NO: 19031 - DNA, 15 bp, synthetic construct
  source 1..15: mol_type = other DNA
gggtgggttcttagc

SEQ ID NO: 19032 - DNA, 15 bp, synthetic construct
  source 1..15: mol_type = other DNA
aaccagcagaaggtg

SEQ ID NO: 19033 - DNA, 15 bp, synthetic construct
  source 1..15: mol_type = other DNA
gtgatccgatcagtg

SEQ ID NO: 19034 - DNA, 15 bp, synthetic construct
  source 1..15: mol_type = other DNA
gtctcacaggtgaac

SEQ ID NO: 19035 - DNA, 15 bp, synthetic construct
  source 1..15: mol_type = other DNA
gtgatccgatcagtg

SEQ ID NO: 19036 - DNA, 15 bp, synthetic construct
  source 1..15: mol_type = other DNA
gtctcacaggtgaac

SEQ ID NO: 19037 - DNA, 15 bp, synthetic construct
  source 1..15: mol_type = other DNA
tccaggagcgcgatg

SEQ ID NO: 19038 - DNA, 15 bp, synthetic construct
  source 1..15: mol_type = other DNA
tccaactgcacagac

SEQ ID NO: 19039 - DNA, 15 bp, synthetic construct
  source 1..15: mol_type = other DNA
tccaggagcgcgatg

SEQ ID NO: 19040 - DNA, 15 bp, synthetic construct
  source 1..15: mol_type = other DNA
tccaactgcacagac

SEQ ID NO: 19041 - DNA, 15 bp, synthetic construct
  source 1..15: mol_type = other DNA
cggtctggaacatga

SEQ ID NO: 19042 - DNA, 15 bp, synthetic construct
  source 1..15: mol_type = other DNA
agggtcctggatatg

SEQ ID NO: 19043 - DNA, 15 bp, synthetic construct
  source 1..15: mol_type = other DNA
cggtctggaacatga

SEQ ID NO: 19044 - DNA, 15 bp, synthetic construct
  source 1..15: mol_type = other DNA
agggtcctggatatg

SEQ ID NO: 19045 - DNA, 15 bp, synthetic construct
  source 1..15: mol_type = other DNA
aaacttgcggtaggc

SEQ ID NO: 19046 - DNA, 15 bp, synthetic construct
  source 1..15: mol_type = other DNA
tggcactatcgtctc

SEQ ID NO: 19047 - DNA, 15 bp, synthetic construct
  source 1..15: mol_type = other DNA
ttgggatcctgtata

SEQ ID NO: 19048 - DNA, 15 bp, synthetic construct
  source 1..15: mol_type = other DNA
ttcctgtcccttcag

SEQ ID NO: 19049 - DNA, 15 bp, synthetic construct
  source 1..15: mol_type = other DNA
tctgtcaagatctcc

SEQ ID NO: 19050 - DNA, 15 bp, synthetic construct
  source 1..15: mol_type = other DNA
tcgctgggactaaac

SEQ ID NO: 19051 - DNA, 15 bp, synthetic construct
  source 1..15: mol_type = other DNA
ccaaacatctccacc

SEQ ID NO: 19052 - DNA, 15 bp, synthetic construct
  source 1..15: mol_type = other DNA
cttgacccgactttc

SEQ ID NO: 19053 - DNA, 15 bp, synthetic construct
  source 1..15: mol_type = other DNA
ccaaacatctccacc

SEQ ID NO: 19054 - DNA, 15 bp, synthetic construct
  source 1..15: mol_type = other DNA
cttgacccgactttc

SEQ ID NO: 19055 - DNA, 15 bp, synthetic construct
  source 1..15: mol_type = other DNA
tggtgtactcgatac

SEQ ID NO: 19056 - DNA, 15 bp, synthetic construct
  source 1..15: mol_type = other DNA
catggaccacaccgt

SEQ ID NO: 19057 - DNA, 15 bp, synthetic construct
  source 1..15: mol_type = other DNA
tggtgtactcgatac

SEQ ID NO: 19058 - DNA, 15 bp, synthetic construct
  source 1..15: mol_type = other DNA
catggaccacaccgt

SEQ ID NO: 19059 - DNA, 15 bp, synthetic construct
  source 1..15: mol_type = other DNA
aggaaaccaggtgtc

SEQ ID NO: 19060 - DNA, 15 bp, synthetic construct
  source 1..15: mol_type = other DNA
ggttgtttactgtac

SEQ ID NO: 19061 - DNA, 15 bp, synthetic construct
  source 1..15: mol_type = other DNA
ccttccacatcactc

SEQ ID NO: 19062 - DNA, 15 bp, synthetic construct
  source 1..15: mol_type = other DNA
tacctgtcccctgat

SEQ ID NO: 19063 - DNA, 15 bp, synthetic construct
  source 1..15: mol_type = other DNA
tggcctctcgtttta

SEQ ID NO: 19064 - DNA, 15 bp, synthetic construct
  source 1..15: mol_type = other DNA
cctctcccctgaaca

SEQ ID NO: 19065 - DNA, 15 bp, synthetic construct
  source 1..15: mol_type = other DNA
cctcactcacaaaca

SEQ ID NO: 19066 - DNA, 15 bp, synthetic construct
  source 1..15: mol_type = other DNA
cgtctgaggaggaag

SEQ ID NO: 19067 - DNA, 15 bp, synthetic construct
  source 1..15: mol_type = other DNA
ttcataaagttgtcg

SEQ ID NO: 19068 - DNA, 15 bp, synthetic construct
  source 1..15: mol_type = other DNA
caccggtcctattac

SEQ ID NO: 19069 - DNA, 15 bp, synthetic construct
  source 1..15: mol_type = other DNA
tgttgaatgtgaagt

SEQ ID NO: 19070 - DNA, 15 bp, synthetic construct
  source 1..15: mol_type = other DNA
aaatgccatgaatct

SEQ ID NO: 19071 - DNA, 15 bp, synthetic construct
  source 1..15: mol_type = other DNA
ttccacatctcacgc

SEQ ID NO: 19072 - DNA, 15 bp, synthetic construct
  source 1..15: mol_type = other DNA
ctcaccgtccctcct

SEQ ID NO: 19073 - DNA, 15 bp, synthetic construct
  source 1..15: mol_type = other DNA
accgccaggagttct

SEQ ID NO: 19074 - DNA, 15 bp, synthetic construct
  source 1..15: mol_type = other DNA
agtgccacctttccg

SEQ ID NO: 19075 - DNA, 15 bp, synthetic construct
  source 1..15: mol_type = other DNA
aaaggtggcactagg

SEQ ID NO: 19076 - DNA, 15 bp, synthetic construct
  source 1..15: mol_type = other DNA
aaggtcacactggat

SEQ ID NO: 19077 - DNA, 15 bp, synthetic construct
  source 1..15: mol_type = other DNA
tatcaggaaagcgtg

SEQ ID NO: 19078 - DNA, 15 bp, synthetic construct
  source 1..15: mol_type = other DNA
tgtcctatccagggt

SEQ ID NO: 19079 - DNA, 15 bp, synthetic construct
  source 1..15: mol_type = other DNA
agtttcatgcatcaa

SEQ ID NO: 19080 - DNA, 15 bp, synthetic construct
  source 1..15: mol_type = other DNA
acctttcaccatttt

SEQ ID NO: 19081 - DNA, 15 bp, synthetic construct
  source 1..15: mol_type = other DNA
gagacaccctcgtgg

SEQ ID NO: 19082 - DNA, 15 bp, synthetic construct
  source 1..15: mol_type = other DNA
gggctaggtagggat

SEQ ID NO: 19083 - DNA, 15 bp, synthetic construct
  source 1..15: mol_type = other DNA
acccaattcttccgt

SEQ ID NO: 19084 - DNA, 15 bp, synthetic construct
  source 1..15: mol_type = other DNA
ctccaacgatagtcc

SEQ ID NO: 19085 - DNA, 15 bp, synthetic construct
  source 1..15: mol_type = other DNA
cgtacaggaggttcc

SEQ ID NO: 19086 - DNA, 15 bp, synthetic construct
  source 1..15: mol_type = other DNA
ctctatcgcggtcaa

SEQ ID NO: 19087 - DNA, 15 bp, synthetic construct
  source 1..15: mol_type = other DNA
ataagaggcactaca

SEQ ID NO: 19088 - DNA, 15 bp, synthetic construct
  source 1..15: mol_type = other DNA
gaggagacctatgcc

SEQ ID NO: 19089 - DNA, 15 bp, synthetic construct
  source 1..15: mol_type = other DNA
cggtggtaggtgtcc

SEQ ID NO: 19090 - DNA, 15 bp, synthetic construct
  source 1..15: mol_type = other DNA
ccaggcattctccga

SEQ ID NO: 19091 - DNA, 15 bp, synthetic construct
  source 1..15: mol_type = other DNA
atgaggtcctgtatg

SEQ ID NO: 19092 - DNA, 15 bp, synthetic construct
  source 1..15: mol_type = other DNA
ttgtttctgggttat

SEQ ID NO: 19093 - DNA, 15 bp, synthetic construct
  source 1..15: mol_type = other DNA
gtggagataagcagc

SEQ ID NO: 19094 - DNA, 15 bp, synthetic construct
  source 1..15: mol_type = other DNA
gaggtgggtacatgg

SEQ ID NO: 19095 - DNA, 15 bp, synthetic construct
  source 1..15: mol_type = other DNA
tgctagttgctacga

SEQ ID NO: 19096 - DNA, 15 bp, synthetic construct
  source 1..15: mol_type = other DNA
gtgagggtgtgaatg

SEQ ID NO: 19097 - DNA, 15 bp, synthetic construct
  source 1..15: mol_type = other DNA
ttgttgagctaccga

SEQ ID NO: 19098 - DNA, 15 bp, synthetic construct
  source 1..15: mol_type = other DNA
gagatgcctgttaat

SEQ ID NO: 19099 - DNA, 15 bp, synthetic construct
  source 1..15: mol_type = other DNA
ggcatctcagtgtga

SEQ ID NO: 19100 - DNA, 15 bp, synthetic construct
  source 1..15: mol_type = other DNA
tgaccccttcttccg

SEQ ID NO: 19101 - DNA, 15 bp, synthetic construct
  source 1..15: mol_type = other DNA
gcacagctccttaac

SEQ ID NO: 19102 - DNA, 15 bp, synthetic construct
  source 1..15: mol_type = other DNA
cttggagatacttgt

SEQ ID NO: 19103 - DNA, 15 bp, synthetic construct
  source 1..15: mol_type = other DNA
ggatgaacaatgatt

SEQ ID NO: 19104 - DNA, 15 bp, synthetic construct
  source 1..15: mol_type = other DNA
gactaccgtcgtgag

SEQ ID NO: 19105 - DNA, 15 bp, synthetic construct
  source 1..15: mol_type = other DNA
ctcacctgaaattct

SEQ ID NO: 19106 - DNA, 15 bp, synthetic construct
  source 1..15: mol_type = other DNA
cacaggcctagagta

SEQ ID NO: 19107 - DNA, 15 bp, synthetic construct
  source 1..15: mol_type = other DNA
tttctgtctctgaca

SEQ ID NO: 19108 - DNA, 15 bp, synthetic construct
  source 1..15: mol_type = other DNA
agtgactcccacctt

SEQ ID NO: 19109 - DNA, 15 bp, synthetic construct
  source 1..15: mol_type = other DNA
ggtgggagtcacttc

SEQ ID NO: 19110 - DNA, 15 bp, synthetic construct
  source 1..15: mol_type = other DNA
aactctgccacaatg

SEQ ID NO: 19111 - DNA, 15 bp, synthetic construct
  source 1..15: mol_type = other DNA
ttcccattttacaga

SEQ ID NO: 19112 - DNA, 15 bp, synthetic construct
  source 1..15: mol_type = other DNA
ctcttcgcttacttc

SEQ ID NO: 19113 - DNA, 15 bp, synthetic construct
  source 1..15: mol_type = other DNA
cgaagaggtgaggag

SEQ ID NO: 19114 - DNA, 15 bp, synthetic construct
  source 1..15: mol_type = other DNA
tgttctctccccaga

SEQ ID NO: 19115 - DNA, 15 bp, synthetic construct
  source 1..15: mol_type = other DNA
ggtctgcacaatccg

SEQ ID NO: 19116 - DNA, 15 bp, synthetic construct
  source 1..15: mol_type = other DNA
tgtgcagatgatata

SEQ ID NO: 19117 - DNA, 15 bp, synthetic construct
  source 1..15: mol_type = other DNA
acctccatcttccgc

SEQ ID NO: 19118 - DNA, 15 bp, synthetic construct
  source 1..15: mol_type = other DNA
ggagagtgggttagg

SEQ ID NO: 19119 - DNA, 15 bp, synthetic construct
  source 1..15: mol_type = other DNA
ggagagtgggttagg

SEQ ID NO: 19120 - DNA, 15 bp, synthetic construct
  source 1..15: mol_type = other DNA
cattacccccaccca

SEQ ID NO: 19121 - DNA, 15 bp, synthetic construct
  source 1..15: mol_type = other DNA
cagcagtattcgtgg

SEQ ID NO: 19122 - DNA, 15 bp, synthetic construct
  source 1..15: mol_type = other DNA
ggctgagggagactt

SEQ ID NO: 19123 - DNA, 15 bp, synthetic construct
  source 1..15: mol_type = other DNA
atactttgataagga

SEQ ID NO: 19124 - DNA, 15 bp, synthetic construct
  source 1..15: mol_type = other DNA
aataatccctcctct

SEQ ID NO: 19125 - DNA, 15 bp, synthetic construct
  source 1..15: mol_type = other DNA
aagggataggcatca

SEQ ID NO: 19126 - DNA, 15 bp, synthetic construct
  source 1..15: mol_type = other DNA
gccttttatcctgac

SEQ ID NO: 19127 - DNA, 15 bp, synthetic construct
  source 1..15: mol_type = other DNA
cactcctcacaggac

SEQ ID NO: 19128 - DNA, 15 bp, synthetic construct
  source 1..15: mol_type = other DNA
ttcgtctgtgtctta

SEQ ID NO: 19129 - DNA, 15 bp, synthetic construct
  source 1..15: mol_type = other DNA
acttcagtctgtgtc

SEQ ID NO: 19130 - DNA, 15 bp, synthetic construct
  source 1..15: mol_type = other DNA
aagttcagcatcttc

SEQ ID NO: 19131 - DNA, 15 bp, synthetic construct
  source 1..15: mol_type = other DNA
ttctctggcttcttg

SEQ ID NO: 19132 - DNA, 15 bp, synthetic construct
  source 1..15: mol_type = other DNA
atgtggagcaggtag

SEQ ID NO: 19133 - DNA, 15 bp, synthetic construct
  source 1..15: mol_type = other DNA
tgtacagagagagtc

SEQ ID NO: 19134 - DNA, 15 bp, synthetic construct
  source 1..15: mol_type = other DNA
actgcctctgtgtat

SEQ ID NO: 19135 - DNA, 15 bp, synthetic construct
  source 1..15: mol_type = other DNA
gattttccgaccttc

SEQ ID NO: 19136 - DNA, 15 bp, synthetic construct
  source 1..15: mol_type = other DNA
tccaggatgcccaaa

SEQ ID NO: 19137 - DNA, 15 bp, synthetic construct
  source 1..15: mol_type = other DNA
agaacttctccatgg

SEQ ID NO: 19138 - DNA, 15 bp, synthetic construct
  source 1..15: mol_type = other DNA
tctcagaggcaggaa

SEQ ID NO: 19139 - DNA, 15 bp, synthetic construct
  source 1..15: mol_type = other DNA
agtctgtgctcttga

SEQ ID NO: 19140 - DNA, 15 bp, synthetic construct
  source 1..15: mol_type = other DNA
gcgagaacagttggc

SEQ ID NO: 19141 - DNA, 15 bp, synthetic construct
  source 1..15: mol_type = other DNA
atggtgtccccatgc

SEQ ID NO: 19142 - DNA, 15 bp, synthetic construct
  source 1..15: mol_type = other DNA
agcaggagtctggtc

SEQ ID NO: 19143 - DNA, 15 bp, synthetic construct
  source 1..15: mol_type = other DNA
ggacctacgtggtat

SEQ ID NO: 19144 - DNA, 15 bp, synthetic construct
  source 1..15: mol_type = other DNA
tgtcccggctctcac

SEQ ID NO: 19145 - DNA, 15 bp, synthetic construct
  source 1..15: mol_type = other DNA
ctgatggaaatgagg

SEQ ID NO: 19146 - DNA, 15 bp, synthetic construct
  source 1..15: mol_type = other DNA
tgattatatttttcc

SEQ ID NO: 19147 - DNA, 15 bp, synthetic construct
  source 1..15: mol_type = other DNA
gagaagcgcagtcgg

SEQ ID NO: 19148 - DNA, 15 bp, synthetic construct
  source 1..15: mol_type = other DNA
acaactcgtggagtc

SEQ ID NO: 19149 - DNA, 15 bp, synthetic construct
  source 1..15: mol_type = other DNA
attgacagtttctcc

SEQ ID NO: 19150 - DNA, 15 bp, synthetic construct
  source 1..15: mol_type = other DNA
gtcaaatcgctgttc

SEQ ID NO: 19151 - DNA, 15 bp, synthetic construct
  source 1..15: mol_type = other DNA
gtcaaatcgctgttc

SEQ ID NO: 19152 - DNA, 15 bp, synthetic construct
  source 1..15: mol_type = other DNA
atagccgcccaccag

SEQ ID NO: 19153 - DNA, 15 bp, synthetic construct
  source 1..15: mol_type = other DNA
tagctccttcttcgt

SEQ ID NO: 19154 - DNA, 15 bp, synthetic construct
  source 1..15: mol_type = other DNA
gttgttcctccagtt

SEQ ID NO: 19155 - DNA, 15 bp, synthetic construct
  source 1..15: mol_type = other DNA
tagctccttcttcgt

SEQ ID NO: 19156 - DNA, 15 bp, synthetic construct
  source 1..15: mol_type = other DNA
gttgttcctccagtt

SEQ ID NO: 19157 - DNA, 15 bp, synthetic construct
  source 1..15: mol_type = other DNA
accatgaaggagttg

SEQ ID NO: 19158 - DNA, 15 bp, synthetic construct
  source 1..15: mol_type = other DNA
cctcgccgcggtact

SEQ ID NO: 19159 - DNA, 15 bp, synthetic construct
  source 1..15: mol_type = other DNA
accatgaaggagttg

SEQ ID NO: 19160 - DNA, 15 bp, synthetic construct
  source 1..15: mol_type = other DNA
cctcgccgcggtact

SEQ ID NO: 19161 - DNA, 15 bp, synthetic construct
  source 1..15: mol_type = other DNA
tgcaggccatgctcg

SEQ ID NO: 19162 - DNA, 15 bp, synthetic construct
  source 1..15: mol_type = other DNA
cggatggcgctgagg

SEQ ID NO: 19163 - DNA, 15 bp, synthetic construct
  source 1..15: mol_type = other DNA
tgcaggccatgctcg

SEQ ID NO: 19164 - DNA, 15 bp, synthetic construct
  source 1..15: mol_type = other DNA
cggatggcgctgagg

SEQ ID NO: 19165 - DNA, 15 bp, synthetic construct
  source 1..15: mol_type = other DNA
cgtaagcggctcctc

SEQ ID NO: 19166 - DNA, 15 bp, synthetic construct
  source 1..15: mol_type = other DNA
ccttcacctcgtcca

SEQ ID NO: 19167 - DNA, 15 bp, synthetic construct
  source 1..15: mol_type = other DNA
ccttcacctcgtcca

SEQ ID NO: 19168 - DNA, 15 bp, synthetic construct
  source 1..15: mol_type = other DNA
ccttcacctcgtcca

SEQ ID NO: 19169 - DNA, 15 bp, synthetic construct
  source 1..15: mol_type = other DNA
ggatggaggagatgg

SEQ ID NO: 19170 - DNA, 15 bp, synthetic construct
  source 1..15: mol_type = other DNA
gcaggcttcggcgtt

SEQ ID NO: 19171 - DNA, 15 bp, synthetic construct
  source 1..15: mol_type = other DNA
agagctggttcgagc

SEQ ID NO: 19172 - DNA, 15 bp, synthetic construct
  source 1..15: mol_type = other DNA
cttggtgaatcttta

SEQ ID NO: 19173 - DNA, 15 bp, synthetic construct
  source 1..15: mol_type = other DNA
ccaatgtcgggagag

SEQ ID NO: 19174 - DNA, 15 bp, synthetic construct
  source 1..15: mol_type = other DNA
gcagggctggaacta

SEQ ID NO: 19175 - DNA, 15 bp, synthetic construct
  source 1..15: mol_type = other DNA
cagccccttttccgc

SEQ ID NO: 19176 - DNA, 15 bp, synthetic construct
  source 1..15: mol_type = other DNA
gaggctcacgcccta

SEQ ID NO: 19177 - DNA, 15 bp, synthetic construct
  source 1..15: mol_type = other DNA
acatcagcccctctg

SEQ ID NO: 19178 - DNA, 15 bp, synthetic construct
  source 1..15: mol_type = other DNA
caccagcatgctcgt

SEQ ID NO: 19179 - DNA, 15 bp, synthetic construct
  source 1..15: mol_type = other DNA
ggccgtctctggctt

SEQ ID NO: 19180 - DNA, 15 bp, synthetic construct
  source 1..15: mol_type = other DNA
gcacagtctccactt

SEQ ID NO: 19181 - DNA, 15 bp, synthetic construct
  source 1..15: mol_type = other DNA
ccggctctcacctag

SEQ ID NO: 19182 - DNA, 15 bp, synthetic construct
  source 1..15: mol_type = other DNA
acctccccactattg

SEQ ID NO: 19183 - DNA, 15 bp, synthetic construct
  source 1..15: mol_type = other DNA
gaggtgggtactacc

SEQ ID NO: 19184 - DNA, 15 bp, synthetic construct
  source 1..15: mol_type = other DNA
gaggaggctcagtcg

SEQ ID NO: 19185 - DNA, 15 bp, synthetic construct
  source 1..15: mol_type = other DNA
gacctcctctccaag

SEQ ID NO: 19186 - DNA, 15 bp, synthetic construct
  source 1..15: mol_type = other DNA
cagtgctcctcaacg

SEQ ID NO: 19187 - DNA, 15 bp, synthetic construct
  source 1..15: mol_type = other DNA
ccgttgatgatgacg

SEQ ID NO: 19188 - DNA, 15 bp, synthetic construct
  source 1..15: mol_type = other DNA
agtctgatgggaatc

SEQ ID NO: 19189 - DNA, 15 bp, synthetic construct
  source 1..15: mol_type = other DNA
tcggctggactcgtc

SEQ ID NO: 19190 - DNA, 15 bp, synthetic construct
  source 1..15: mol_type = other DNA
cagagaggcgtcata

SEQ ID NO: 19191 - DNA, 15 bp, synthetic construct
  source 1..15: mol_type = other DNA
atgtccccgggagag

SEQ ID NO: 19192 - DNA, 15 bp, synthetic construct
  source 1..15: mol_type = other DNA
caagaccatctggga

SEQ ID NO: 19193 - DNA, 15 bp, synthetic construct
  source 1..15: mol_type = other DNA
gagcgctccttgaag

SEQ ID NO: 19194 - DNA, 15 bp, synthetic construct
  source 1..15: mol_type = other DNA
cgacccggtgttgcg

SEQ ID NO: 19195 - DNA, 15 bp, synthetic construct
  source 1..15: mol_type = other DNA
agcgggaacttcttg

SEQ ID NO: 19196 - DNA, 15 bp, synthetic construct
  source 1..15: mol_type = other DNA
cgcttgagccgcttc

SEQ ID NO: 19197 - DNA, 15 bp, synthetic construct
  source 1..15: mol_type = other DNA
tcgctgccacgtagg

SEQ ID NO: 19198 - DNA, 15 bp, synthetic construct
  source 1..15: mol_type = other DNA
ttgcagactttgcag

SEQ ID NO: 19199 - DNA, 15 bp, synthetic construct
  source 1..15: mol_type = other DNA
gggcggttcggaagc

SEQ ID NO: 19200 - DNA, 15 bp, synthetic construct
  source 1..15: mol_type = other DNA
aacttcccaaagttg

SEQ ID NO: 19201 - DNA, 15 bp, synthetic construct
  source 1..15: mol_type = other DNA
cctaggcagctgagg

SEQ ID NO: 19202 - DNA, 15 bp, synthetic construct
  source 1..15: mol_type = other DNA
ccgggccagcatcct

SEQ ID NO: 19203 - DNA, 15 bp, synthetic construct
  source 1..15: mol_type = other DNA
ctctggctccttcag

SEQ ID NO: 19204 - DNA, 15 bp, synthetic construct
  source 1..15: mol_type = other DNA
ctgtgtgtctccttg

SEQ ID NO: 19205 - DNA, 15 bp, synthetic construct
  source 1..15: mol_type = other DNA
cttacatccctctcc

SEQ ID NO: 19206 - DNA, 15 bp, synthetic construct
  source 1..15: mol_type = other DNA
aggagtgaatgtttt

SEQ ID NO: 19207 - DNA, 15 bp, synthetic construct
  source 1..15: mol_type = other DNA
tgatataggatggat

SEQ ID NO: 19208 - DNA, 15 bp, synthetic construct
  source 1..15: mol_type = other DNA
cctcatccagaaccg

SEQ ID NO: 19209 - DNA, 15 bp, synthetic construct
  source 1..15: mol_type = other DNA
ctgtttctcatcatc

SEQ ID NO: 19210 - DNA, 15 bp, synthetic construct
  source 1..15: mol_type = other DNA
cctatctcccctctg

SEQ ID NO: 19211 - DNA, 15 bp, synthetic construct
  source 1..15: mol_type = other DNA
ccaatgttgagtctt

SEQ ID NO: 19212 - DNA, 15 bp, synthetic construct
  source 1..15: mol_type = other DNA
ggatgatctcaagaa

SEQ ID NO: 19213 - DNA, 15 bp, synthetic construct
  source 1..15: mol_type = other DNA
tgtctcacgagtttc

SEQ ID NO: 19214 - DNA, 15 bp, synthetic construct
  source 1..15: mol_type = other DNA
agccgaggctggatc

SEQ ID NO: 19215 - DNA, 15 bp, synthetic construct
  source 1..15: mol_type = other DNA
ctcggctatttacgc

SEQ ID NO: 19216 - DNA, 15 bp, synthetic construct
  source 1..15: mol_type = other DNA
cggaagtccgctcta

SEQ ID NO: 19217 - DNA, 15 bp, synthetic construct
  source 1..15: mol_type = other DNA
actcaagtaaatgtt

SEQ ID NO: 19218 - DNA, 15 bp, synthetic construct
  source 1..15: mol_type = other DNA
tcgaggtgatcaagc

SEQ ID NO: 19219 - DNA, 15 bp, synthetic construct
  source 1..15: mol_type = other DNA
actgatcacagagag

SEQ ID NO: 19220 - DNA, 15 bp, synthetic construct
  source 1..15: mol_type = other DNA
agaagtttcgcgtgt

SEQ ID NO: 19221 - DNA, 15 bp, synthetic construct
  source 1..15: mol_type = other DNA
ccacgtgcgaccacc

SEQ ID NO: 19222 - DNA, 15 bp, synthetic construct
  source 1..15: mol_type = other DNA
tcctacactgtccct

SEQ ID NO: 19223 - DNA, 15 bp, synthetic construct
  source 1..15: mol_type = other DNA
aaatgaagtttgagg

SEQ ID NO: 19224 - DNA, 15 bp, synthetic construct
  source 1..15: mol_type = other DNA
gaggcctgaatggtc

SEQ ID NO: 19225 - DNA, 15 bp, synthetic construct
  source 1..15: mol_type = other DNA
ctcaccccgtatctc

SEQ ID NO: 19226 - DNA, 15 bp, synthetic construct
  source 1..15: mol_type = other DNA
aggagacgattcgta

SEQ ID NO: 19227 - DNA, 15 bp, synthetic construct
  source 1..15: mol_type = other DNA
agctacctgtttgcc

SEQ ID NO: 19228 - DNA, 15 bp, synthetic construct
  source 1..15: mol_type = other DNA
gtccccctgaggata

SEQ ID NO: 19229 - DNA, 15 bp, synthetic construct
  source 1..15: mol_type = other DNA
ccagcctcctcctcc

SEQ ID NO: 19230 - DNA, 15 bp, synthetic construct
  source 1..15: mol_type = other DNA
tcctgctgggcagat

SEQ ID NO: 19231 - DNA, 15 bp, synthetic construct
  source 1..15: mol_type = other DNA
cttcacaccatccgt

SEQ ID NO: 19232 - DNA, 15 bp, synthetic construct
  source 1..15: mol_type = other DNA
ggctggatgagagaa

SEQ ID NO: 19233 - DNA, 15 bp, synthetic construct
  source 1..15: mol_type = other DNA
ctgggttagagtttg

SEQ ID NO: 19234 - DNA, 15 bp, synthetic construct
  source 1..15: mol_type = other DNA
tttcttctcctcatt

SEQ ID NO: 19235 - DNA, 15 bp, synthetic construct
  source 1..15: mol_type = other DNA
agagtgaatccagaa

SEQ ID NO: 19236 - DNA, 15 bp, synthetic construct
  source 1..15: mol_type = other DNA
gtcaagagggtcatc

SEQ ID NO: 19237 - DNA, 15 bp, synthetic construct
  source 1..15: mol_type = other DNA
ccttcacggcgtagt

SEQ ID NO: 19238 - DNA, 15 bp, synthetic construct
  source 1..15: mol_type = other DNA
attggtcctctgtcg

SEQ ID NO: 19239 - DNA, 15 bp, synthetic construct
  source 1..15: mol_type = other DNA
cggaggtttattgtc

SEQ ID NO: 19240 - DNA, 15 bp, synthetic construct
  source 1..15: mol_type = other DNA
cccgtgctcacacgt

SEQ ID NO: 19241 - DNA, 15 bp, synthetic construct
  source 1..15: mol_type = other DNA
cccaagcggtctgcg

SEQ ID NO: 19242 - DNA, 15 bp, synthetic construct
  source 1..15: mol_type = other DNA
ctgctgcgcggacga

SEQ ID NO: 19243 - DNA, 15 bp, synthetic construct
  source 1..15: mol_type = other DNA
agccgtgcccacgaa

SEQ ID NO: 19244 - DNA, 15 bp, synthetic construct
  source 1..15: mol_type = other DNA
caacccctcgactcc

SEQ ID NO: 19245 - DNA, 15 bp, synthetic construct
  source 1..15: mol_type = other DNA
caacccctcgactcc

SEQ ID NO: 19246 - DNA, 15 bp, synthetic construct
  source 1..15: mol_type = other DNA
gcagtgctgcatacg

SEQ ID NO: 19247 - DNA, 15 bp, synthetic construct
  source 1..15: mol_type = other DNA
gagcggatatcagta

SEQ ID NO: 19248 - DNA, 15 bp, synthetic construct
  source 1..15: mol_type = other DNA
acctcagaaccaacg

SEQ ID NO: 19249 - DNA, 15 bp, synthetic construct
  source 1..15: mol_type = other DNA
tccacctcttctgtg

SEQ ID NO: 19250 - DNA, 15 bp, synthetic construct
  source 1..15: mol_type = other DNA
catcgttcgtgactt

SEQ ID NO: 19251 - DNA, 15 bp, synthetic construct
  source 1..15: mol_type = other DNA
cttcacgaacacagt

SEQ ID NO: 19252 - DNA, 15 bp, synthetic construct
  source 1..15: mol_type = other DNA
gacggagcagattcg

SEQ ID NO: 19253 - DNA, 15 bp, synthetic construct
  source 1..15: mol_type = other DNA
tgagaatgcacatga

SEQ ID NO: 19254 - DNA, 15 bp, synthetic construct
  source 1..15: mol_type = other DNA
gagaagatcttctgt

SEQ ID NO: 19255 - DNA, 15 bp, synthetic construct
  source 1..15: mol_type = other DNA
gaagaggaagtagga

SEQ ID NO: 19256 - DNA, 15 bp, synthetic construct
  source 1..15: mol_type = other DNA
tactactgttggctt

SEQ ID NO: 19257 - DNA, 15 bp, synthetic construct
  source 1..15: mol_type = other DNA
ggagcaatgtcagcc

SEQ ID NO: 19258 - DNA, 15 bp, synthetic construct
  source 1..15: mol_type = other DNA
tactacgtggtacgg

SEQ ID NO: 19259 - DNA, 15 bp, synthetic construct
  source 1..15: mol_type = other DNA
gagacgtagagggag

SEQ ID NO: 19260 - DNA, 15 bp, synthetic construct
  source 1..15: mol_type = other DNA
actttgtctttatcg

SEQ ID NO: 19261 - DNA, 15 bp, synthetic construct
  source 1..15: mol_type = other DNA
aacttcttatagcgg

SEQ ID NO: 19262 - DNA, 15 bp, synthetic construct
  source 1..15: mol_type = other DNA
ttcagttatggtgat

SEQ ID NO: 19263 - DNA, 15 bp, synthetic construct
  source 1..15: mol_type = other DNA
catcctcatccatag

SEQ ID NO: 19264 - DNA, 15 bp, synthetic construct
  source 1..15: mol_type = other DNA
tttcttgcagacatc

SEQ ID NO: 19265 - DNA, 15 bp, synthetic construct
  source 1..15: mol_type = other DNA
gtgaaactggtgttt

SEQ ID NO: 19266 - DNA, 15 bp, synthetic construct
  source 1..15: mol_type = other DNA
gaatgtgaccagatg

SEQ ID NO: 19267 - DNA, 15 bp, synthetic construct
  source 1..15: mol_type = other DNA
cattcacgaatcacc

SEQ ID NO: 19268 - DNA, 15 bp, synthetic construct
  source 1..15: mol_type = other DNA
actgcaaagcttagt

SEQ ID NO: 19269 - DNA, 15 bp, synthetic construct
  source 1..15: mol_type = other DNA
aattggctgtctcta

SEQ ID NO: 19270 - DNA, 15 bp, synthetic construct
  source 1..15: mol_type = other DNA
tatggacacctttgg

SEQ ID NO: 19271 - DNA, 15 bp, synthetic construct
  source 1..15: mol_type = other DNA
tcctggctattgtat

SEQ ID NO: 19272 - DNA, 15 bp, synthetic construct
  source 1..15: mol_type = other DNA
actcacaacgaccca

SEQ ID NO: 19273 - DNA, 15 bp, synthetic construct
  source 1..15: mol_type = other DNA
aaagagccaacaaca

SEQ ID NO: 19274 - DNA, 15 bp, synthetic construct
  source 1..15: mol_type = other DNA
cccgttagcattgtg

SEQ ID NO: 19275 - DNA, 15 bp, synthetic construct
  source 1..15: mol_type = other DNA
ttgctgagaattcag

SEQ ID NO: 19276 - DNA, 15 bp, synthetic construct
  source 1..15: mol_type = other DNA
tattcactatgatgc

SEQ ID NO: 19277 - DNA, 15 bp, synthetic construct
  source 1..15: mol_type = other DNA
atatggaattcaaag

SEQ ID NO: 19278 - DNA, 15 bp, synthetic construct
  source 1..15: mol_type = other DNA
ttgctccacttttgc

SEQ ID NO: 19279 - DNA, 15 bp, synthetic construct
  source 1..15: mol_type = other DNA
tgggtcaatttttca

SEQ ID NO: 19280 - DNA, 15 bp, synthetic construct
  source 1..15: mol_type = other DNA
gaaggcagctaatca

SEQ ID NO: 19281 - DNA, 15 bp, synthetic construct
  source 1..15: mol_type = other DNA
ttcaaagatggatgt

SEQ ID NO: 19282 - DNA, 15 bp, synthetic construct
  source 1..15: mol_type = other DNA
cattgaaatgtcaga

SEQ ID NO: 19283 - DNA, 15 bp, synthetic construct
  source 1..15: mol_type = other DNA
acaaaagagtgccac

SEQ ID NO: 19284 - DNA, 15 bp, synthetic construct
  source 1..15: mol_type = other DNA
acctgcctgtatgct

SEQ ID NO: 19285 - DNA, 15 bp, synthetic construct
  source 1..15: mol_type = other DNA
agcaaaaaggctctc

SEQ ID NO: 19286 - DNA, 15 bp, synthetic construct
  source 1..15: mol_type = other DNA
caacctgattgaaaa

SEQ ID NO: 19287 - DNA, 15 bp, synthetic construct
  source 1..15: mol_type = other DNA
gattcgacaaccaca

SEQ ID NO: 19288 - DNA, 15 bp, synthetic construct
  source 1..15: mol_type = other DNA
tgtacaacctcacag

SEQ ID NO: 19289 - DNA, 15 bp, synthetic construct
  source 1..15: mol_type = other DNA
gtcaggatctttaaa

SEQ ID NO: 19290 - DNA, 15 bp, synthetic construct
  source 1..15: mol_type = other DNA
cactagttaccacct

SEQ ID NO: 19291 - DNA, 15 bp, synthetic construct
  source 1..15: mol_type = other DNA
aaagaactacaagcc

SEQ ID NO: 19292 - DNA, 15 bp, synthetic construct
  source 1..15: mol_type = other DNA
tctgaagtagaagag

SEQ ID NO: 19293 - DNA, 15 bp, synthetic construct
  source 1..15: mol_type = other DNA
ttgtcctgtttgttt

SEQ ID NO: 19294 - DNA, 15 bp, synthetic construct
  source 1..15: mol_type = other DNA
cattgagaaacatgg

SEQ ID NO: 19295 - DNA, 15 bp, synthetic construct
  source 1..15: mol_type = other DNA
acattttggagttct

SEQ ID NO: 19296 - DNA, 15 bp, synthetic construct
  source 1..15: mol_type = other DNA
gctctgtcttaactg

SEQ ID NO: 19297 - DNA, 15 bp, synthetic construct
  source 1..15: mol_type = other DNA
tggttcagctgctcc

SEQ ID NO: 19298 - DNA, 15 bp, synthetic construct
  source 1..15: mol_type = other DNA
ctgttggtattcttt

SEQ ID NO: 19299 - DNA, 15 bp, synthetic construct
  source 1..15: mol_type = other DNA
ctttattgaatagta

SEQ ID NO: 19300 - DNA, 15 bp, synthetic construct
  source 1..15: mol_type = other DNA
ctctcaagtctgaca

SEQ ID NO: 19301 - DNA, 15 bp, synthetic construct
  source 1..15: mol_type = other DNA
ctggttaaccgaact

SEQ ID NO: 19302 - DNA, 15 bp, synthetic construct
  source 1..15: mol_type = other DNA
tctcagccttttgtt

SEQ ID NO: 19303 - DNA, 15 bp, synthetic construct
  source 1..15: mol_type = other DNA
atgttctctttgagg

SEQ ID NO: 19304 - DNA, 15 bp, synthetic construct
  source 1..15: mol_type = other DNA
acctctgactcctat

SEQ ID NO: 19305 - DNA, 15 bp, synthetic construct
  source 1..15: mol_type = other DNA
tgatgttcgcacagt

SEQ ID NO: 19306 - DNA, 15 bp, synthetic construct
  source 1..15: mol_type = other DNA
tggaatcagggatga

SEQ ID NO: 19307 - DNA, 15 bp, synthetic construct
  source 1..15: mol_type = other DNA
agctggcagcttagc

SEQ ID NO: 19308 - DNA, 15 bp, synthetic construct
  source 1..15: mol_type = other DNA
ggaccaaagaattga

SEQ ID NO: 19309 - DNA, 15 bp, synthetic construct
  source 1..15: mol_type = other DNA
ttatttgtgaaaagt

SEQ ID NO: 19310 - DNA, 15 bp, synthetic construct
  source 1..15: mol_type = other DNA
ttatttgtgaaaagt

SEQ ID NO: 19311 - DNA, 15 bp, synthetic construct
  source 1..15: mol_type = other DNA
aatgaagcggtaaag

SEQ ID NO: 19312 - DNA, 15 bp, synthetic construct
  source 1..15: mol_type = other DNA
ttccccaggcaacgg

SEQ ID NO: 19313 - DNA, 15 bp, synthetic construct
  source 1..15: mol_type = other DNA
cacaatccctgggtg

SEQ ID NO: 19314 - DNA, 15 bp, synthetic construct
  source 1..15: mol_type = other DNA
ttgctggtgttaact

SEQ ID NO: 19315 - DNA, 15 bp, synthetic construct
  source 1..15: mol_type = other DNA
ttaatgcagacccag

SEQ ID NO: 19316 - DNA, 15 bp, synthetic construct
  source 1..15: mol_type = other DNA
tttatagcccgaaac

SEQ ID NO: 19317 - DNA, 15 bp, synthetic construct
  source 1..15: mol_type = other DNA
cagacgcacgtaaag

SEQ ID NO: 19318 - DNA, 15 bp, synthetic construct
  source 1..15: mol_type = other DNA
agcttatgatatttc

SEQ ID NO: 19319 - DNA, 15 bp, synthetic construct
  source 1..15: mol_type = other DNA
atccagaaacagtct

SEQ ID NO: 19320 - DNA, 15 bp, synthetic construct
  source 1..15: mol_type = other DNA
ttttcctccaggtga

SEQ ID NO: 19321 - DNA, 15 bp, synthetic construct
  source 1..15: mol_type = other DNA
catccccctcatcat

SEQ ID NO: 19322 - DNA, 15 bp, synthetic construct
  source 1..15: mol_type = other DNA
cttctactgtgactg

SEQ ID NO: 19323 - DNA, 15 bp, synthetic construct
  source 1..15: mol_type = other DNA
catccccctcatcat

SEQ ID NO: 19324 - DNA, 15 bp, synthetic construct
  source 1..15: mol_type = other DNA
cttctactgtgactg

SEQ ID NO: 19325 - DNA, 15 bp, synthetic construct
  source 1..15: mol_type = other DNA
tccaaggccaactac

SEQ ID NO: 19326 - DNA, 15 bp, synthetic construct
  source 1..15: mol_type = other DNA
cagaataggatgttg

SEQ ID NO: 19327 - DNA, 15 bp, synthetic construct
  source 1..15: mol_type = other DNA
agttttcccacgttg

SEQ ID NO: 19328 - DNA, 15 bp, synthetic construct
  source 1..15: mol_type = other DNA
acagtgcttgtctat

SEQ ID NO: 19329 - DNA, 15 bp, synthetic construct
  source 1..15: mol_type = other DNA
caccaatgatcccag

SEQ ID NO: 19330 - DNA, 15 bp, synthetic construct
  source 1..15: mol_type = other DNA
ccaacgtctgtggtc

SEQ ID NO: 19331 - DNA, 15 bp, synthetic construct
  source 1..15: mol_type = other DNA
ggagtcttactttca

SEQ ID NO: 19332 - DNA, 15 bp, synthetic construct
  source 1..15: mol_type = other DNA
tcccaagcctatctt

SEQ ID NO: 19333 - DNA, 15 bp, synthetic construct
  source 1..15: mol_type = other DNA
ccgcaccccttcagg

SEQ ID NO: 19334 - DNA, 15 bp, synthetic construct
  source 1..15: mol_type = other DNA
aactctttgcctgga

SEQ ID NO: 19335 - DNA, 15 bp, synthetic construct
  source 1..15: mol_type = other DNA
tacattacttctcaa

SEQ ID NO: 19336 - DNA, 15 bp, synthetic construct
  source 1..15: mol_type = other DNA
ttgcagctggacatc

SEQ ID NO: 19337 - DNA, 15 bp, synthetic construct
  source 1..15: mol_type = other DNA
cactggcacggttgt

SEQ ID NO: 19338 - DNA, 15 bp, synthetic construct
  source 1..15: mol_type = other DNA
ccgttgtttcaaata

SEQ ID NO: 19339 - DNA, 15 bp, synthetic construct
  source 1..15: mol_type = other DNA
tccagacacaagagc

SEQ ID NO: 19340 - DNA, 15 bp, synthetic construct
  source 1..15: mol_type = other DNA
gctgtatctgtccac

SEQ ID NO: 19341 - DNA, 15 bp, synthetic construct
  source 1..15: mol_type = other DNA
atttcattctgacag

SEQ ID NO: 19342 - DNA, 15 bp, synthetic construct
  source 1..15: mol_type = other DNA
aggtttagcatttgg

SEQ ID NO: 19343 - DNA, 15 bp, synthetic construct
  source 1..15: mol_type = other DNA
aagagactctttttt

SEQ ID NO: 19344 - DNA, 15 bp, synthetic construct
  source 1..15: mol_type = other DNA
cctgagctgagaagg

SEQ ID NO: 19345 - DNA, 15 bp, synthetic construct
  source 1..15: mol_type = other DNA
tatgttttcactgct

SEQ ID NO: 19346 - DNA, 15 bp, synthetic construct
  source 1..15: mol_type = other DNA
aaaccttgtgtaaac

SEQ ID NO: 19347 - DNA, 15 bp, synthetic construct
  source 1..15: mol_type = other DNA
tggcaatgagattct

SEQ ID NO: 19348 - DNA, 15 bp, synthetic construct
  source 1..15: mol_type = other DNA
agctagggagaggga

SEQ ID NO: 19349 - DNA, 15 bp, synthetic construct
  source 1..15: mol_type = other DNA
taatggctttgacaa

SEQ ID NO: 19350 - DNA, 15 bp, synthetic construct
  source 1..15: mol_type = other DNA
aagaggtgatgttaa

SEQ ID NO: 19351 - DNA, 15 bp, synthetic construct
  source 1..15: mol_type = other DNA
tccttagaatggaca

SEQ ID NO: 19352 - DNA, 15 bp, synthetic construct
  source 1..15: mol_type = other DNA
tgcttgcactagtgg

SEQ ID NO: 19353 - DNA, 15 bp, synthetic construct
  source 1..15: mol_type = other DNA
aattagacaaagggc

SEQ ID NO: 19354 - DNA, 15 bp, synthetic construct
  source 1..15: mol_type = other DNA
ggcgtctcttagtga

SEQ ID NO: 19355 - DNA, 15 bp, synthetic construct
  source 1..15: mol_type = other DNA
attagaaaccaaatt

SEQ ID NO: 19356 - DNA, 15 bp, synthetic construct
  source 1..15: mol_type = other DNA
gtctcttaacgttca

SEQ ID NO: 19357 - DNA, 15 bp, synthetic construct
  source 1..15: mol_type = other DNA
ataaagtcagttcct

SEQ ID NO: 19358 - DNA, 15 bp, synthetic construct
  source 1..15: mol_type = other DNA
ttgatatgagacctg

SEQ ID NO: 19359 - DNA, 15 bp, synthetic construct
  source 1..15: mol_type = other DNA
aggcccagaataaca

SEQ ID NO: 19360 - DNA, 15 bp, synthetic construct
  source 1..15: mol_type = other DNA
tactactatggcttt

SEQ ID NO: 19361 - DNA, 15 bp, synthetic construct
  source 1..15: mol_type = other DNA
agtgtccaaagaagt

SEQ ID NO: 19362 - DNA, 15 bp, synthetic construct
  source 1..15: mol_type = other DNA
aaatggtcagggaag

SEQ ID NO: 19363 - DNA, 15 bp, synthetic construct
  source 1..15: mol_type = other DNA
aatgctaagtactaa

SEQ ID NO: 19364 - DNA, 15 bp, synthetic construct
  source 1..15: mol_type = other DNA
tggttttgtttggtg

SEQ ID NO: 19365 - DNA, 15 bp, synthetic construct
  source 1..15: mol_type = other DNA
cgcaagggataacag

SEQ ID NO: 19366 - DNA, 15 bp, synthetic construct
  source 1..15: mol_type = other DNA
tgacacatacttcaa

SEQ ID NO: 19367 - DNA, 15 bp, synthetic construct
  source 1..15: mol_type = other DNA
cgcgggactgatact

SEQ ID NO: 19368 - DNA, 15 bp, synthetic construct
  source 1..15: mol_type = other DNA
acctctatactcgaa

SEQ ID NO: 19369 - DNA, 15 bp, synthetic construct
  source 1..15: mol_type = other DNA
aacgcgcccctgtcc

SEQ ID NO: 19370 - DNA, 15 bp, synthetic construct
  source 1..15: mol_type = other DNA
ccgggcgccccctaa

SEQ ID NO: 19371 - DNA, 15 bp, synthetic construct
  source 1..15: mol_type = other DNA
agggctcctaccttg

SEQ ID NO: 19372 - DNA, 15 bp, synthetic construct
  source 1..15: mol_type = other DNA
ttgaaaagtggtgtt

SEQ ID NO: 19373 - DNA, 15 bp, synthetic construct
  source 1..15: mol_type = other DNA
ggtgctttggtagca

SEQ ID NO: 19374 - DNA, 15 bp, synthetic construct
  source 1..15: mol_type = other DNA
tgcattcgggcttgc

SEQ ID NO: 19375 - DNA, 15 bp, synthetic construct
  source 1..15: mol_type = other DNA
aggctcgcgatggag

SEQ ID NO: 19376 - DNA, 15 bp, synthetic construct
  source 1..15: mol_type = other DNA
tcatctgcacggaca

SEQ ID NO: 19377 - DNA, 15 bp, synthetic construct
  source 1..15: mol_type = other DNA
ccgttttcgcactcg

SEQ ID NO: 19378 - DNA, 15 bp, synthetic construct
  source 1..15: mol_type = other DNA
ggacggcgagtgtgt

SEQ ID NO: 19379 - DNA, 15 bp, synthetic construct
  source 1..15: mol_type = other DNA
agttggctctgaagc

SEQ ID NO: 19380 - DNA, 15 bp, synthetic construct
  source 1..15: mol_type = other DNA
cgcagtcctgcaacg

SEQ ID NO: 19381 - DNA, 15 bp, synthetic construct
  source 1..15: mol_type = other DNA
ggaacgcagaagtgc

SEQ ID NO: 19382 - DNA, 15 bp, synthetic construct
  source 1..15: mol_type = other DNA
gctcccctcggctta

SEQ ID NO: 19383 - DNA, 15 bp, synthetic construct
  source 1..15: mol_type = other DNA
cagccgccgttctcc

SEQ ID NO: 19384 - DNA, 15 bp, synthetic construct
  source 1..15: mol_type = other DNA
tggcttcctctgcga

SEQ ID NO: 19385 - DNA, 15 bp, synthetic construct
  source 1..15: mol_type = other DNA
ccgtaggtgatcgag

SEQ ID NO: 19386 - DNA, 15 bp, synthetic construct
  source 1..15: mol_type = other DNA
gcgcggcttccagtg

SEQ ID NO: 19387 - DNA, 15 bp, synthetic construct
  source 1..15: mol_type = other DNA
gctggtgttgttgtc

SEQ ID NO: 19388 - DNA, 15 bp, synthetic construct
  source 1..15: mol_type = other DNA
caatgccagtcagat

SEQ ID NO: 19389 - DNA, 15 bp, synthetic construct
  source 1..15: mol_type = other DNA
ggaaatgacatcggc

SEQ ID NO: 19390 - DNA, 15 bp, synthetic construct
  source 1..15: mol_type = other DNA
agtgcccgcgctttc

SEQ ID NO: 19391 - DNA, 15 bp, synthetic construct
  source 1..15: mol_type = other DNA
tcaagtcaaacaggt

SEQ ID NO: 19392 - DNA, 15 bp, synthetic construct
  source 1..15: mol_type = other DNA
gacgcctacaaggtc

SEQ ID NO: 19393 - DNA, 15 bp, synthetic construct
  source 1..15: mol_type = other DNA
ttggcgagtttctcg

SEQ ID NO: 19394 - DNA, 15 bp, synthetic construct
  source 1..15: mol_type = other DNA
gctcgtgtccatgtc

SEQ ID NO: 19395 - DNA, 15 bp, synthetic construct
  source 1..15: mol_type = other DNA
ggtccgccgcttctg

SEQ ID NO: 19396 - DNA, 15 bp, synthetic construct
  source 1..15: mol_type = other DNA
ctcacccgcaccatc

SEQ ID NO: 19397 - DNA, 15 bp, synthetic construct
  source 1..15: mol_type = other DNA
cgacgcttggtgatg

SEQ ID NO: 19398 - DNA, 15 bp, synthetic construct
  source 1..15: mol_type = other DNA
cgaggatctgtactg

SEQ ID NO: 19399 - DNA, 15 bp, synthetic construct
  source 1..15: mol_type = other DNA
ctgctggtagttgct

SEQ ID NO: 19400 - DNA, 15 bp, synthetic construct
  source 1..15: mol_type = other DNA
gacttcgacctgctc

SEQ ID NO: 19401 - DNA, 15 bp, synthetic construct
  source 1..15: mol_type = other DNA
gtggctccttcttca

SEQ ID NO: 19402 - DNA, 15 bp, synthetic construct
  source 1..15: mol_type = other DNA
ccagacaaaggcttg

SEQ ID NO: 19403 - DNA, 15 bp, synthetic construct
  source 1..15: mol_type = other DNA
accgggcggtggcag

SEQ ID NO: 19404 - DNA, 15 bp, synthetic construct
  source 1..15: mol_type = other DNA
gcccgtaagaaacac

SEQ ID NO: 19405 - DNA, 15 bp, synthetic construct
  source 1..15: mol_type = other DNA
tgaagaggttgtgca

SEQ ID NO: 19406 - DNA, 15 bp, synthetic construct
  source 1..15: mol_type = other DNA
tgattggaacgtcat

SEQ ID NO: 19407 - DNA, 15 bp, synthetic construct
  source 1..15: mol_type = other DNA
agaggacggtttgaa

SEQ ID NO: 19408 - DNA, 15 bp, synthetic construct
  source 1..15: mol_type = other DNA
cacattctcaaattc

SEQ ID NO: 19409 - DNA, 15 bp, synthetic construct
  source 1..15: mol_type = other DNA
accctcgtcgacatg

SEQ ID NO: 19410 - DNA, 15 bp, synthetic construct
  source 1..15: mol_type = other DNA
ccaacctaccatttt

SEQ ID NO: 19411 - DNA, 15 bp, synthetic construct
  source 1..15: mol_type = other DNA
gtatgggcgttttgt

SEQ ID NO: 19412 - DNA, 15 bp, synthetic construct
  source 1..15: mol_type = other DNA
cacccctccagatat

SEQ ID NO: 19413 - DNA, 15 bp, synthetic construct
  source 1..15: mol_type = other DNA
cagattgaggcatcc

SEQ ID NO: 19414 - DNA, 15 bp, synthetic construct
  source 1..15: mol_type = other DNA
agctgaccacaagat

SEQ ID NO: 19415 - DNA, 15 bp, synthetic construct
  source 1..15: mol_type = other DNA
gtcaggaggtcactg

SEQ ID NO: 19416 - DNA, 15 bp, synthetic construct
  source 1..15: mol_type = other DNA
ggcaccgtagtgttt

SEQ ID NO: 19417 - DNA, 15 bp, synthetic construct
  source 1..15: mol_type = other DNA
ggcaccaacctcaac

SEQ ID NO: 19418 - DNA, 15 bp, synthetic construct
  source 1..15: mol_type = other DNA
ccactcagggagaag

SEQ ID NO: 19419 - DNA, 15 bp, synthetic construct
  source 1..15: mol_type = other DNA
cctaagaggaggaag

SEQ ID NO: 19420 - DNA, 15 bp, synthetic construct
  source 1..15: mol_type = other DNA
gagtcataaagtgtg

SEQ ID NO: 19421 - DNA, 15 bp, synthetic construct
  source 1..15: mol_type = other DNA
ctcatcagtcacaga

SEQ ID NO: 19422 - DNA, 15 bp, synthetic construct
  source 1..15: mol_type = other DNA
gagctcctctgtagt

SEQ ID NO: 19423 - DNA, 15 bp, synthetic construct
  source 1..15: mol_type = other DNA
tgagcttccttcaga

SEQ ID NO: 19424 - DNA, 15 bp, synthetic construct
  source 1..15: mol_type = other DNA
ttcttcgcccgaatg

SEQ ID NO: 19425 - DNA, 15 bp, synthetic construct
  source 1..15: mol_type = other DNA
tctctcgaagatcac

SEQ ID NO: 19426 - DNA, 15 bp, synthetic construct
  source 1..15: mol_type = other DNA
cagtccacggctata

SEQ ID NO: 19427 - DNA, 15 bp, synthetic construct
  source 1..15: mol_type = other DNA
ttcaggcaggtagag

SEQ ID NO: 19428 - DNA, 15 bp, synthetic construct
  source 1..15: mol_type = other DNA
catgctaggcatacc

SEQ ID NO: 19429 - DNA, 15 bp, synthetic construct
  source 1..15: mol_type = other DNA
tgccaacttaaaagc

SEQ ID NO: 19430 - DNA, 15 bp, synthetic construct
  source 1..15: mol_type = other DNA
gaagatgatggcttt

SEQ ID NO: 19431 - DNA, 15 bp, synthetic construct
  source 1..15: mol_type = other DNA
acgcatccttgacga

SEQ ID NO: 19432 - DNA, 15 bp, synthetic construct
  source 1..15: mol_type = other DNA
cttgacttgcctcat

SEQ ID NO: 19433 - DNA, 15 bp, synthetic construct
  source 1..15: mol_type = other DNA
atcataattcatgct

SEQ ID NO: 19434 - DNA, 15 bp, synthetic construct
  source 1..15: mol_type = other DNA
ggcggtcgttgatgt

SEQ ID NO: 19435 - DNA, 15 bp, synthetic construct
  source 1..15: mol_type = other DNA
ttgtagatgccaagg

SEQ ID NO: 19436 - DNA, 15 bp, synthetic construct
  source 1..15: mol_type = other DNA
caacaggttgtcaat

SEQ ID NO: 19437 - DNA, 15 bp, synthetic construct
  source 1..15: mol_type = other DNA
gagcagatccagttc

SEQ ID NO: 19438 - DNA, 15 bp, synthetic construct
  source 1..15: mol_type = other DNA
tagaccattgccttg

SEQ ID NO: 19439 - DNA, 15 bp, synthetic construct
  source 1..15: mol_type = other DNA
tcctgatcgaccttc

SEQ ID NO: 19440 - DNA, 15 bp, synthetic construct
  source 1..15: mol_type = other DNA
actccactttctcct

SEQ ID NO: 19441 - DNA, 15 bp, synthetic construct
  source 1..15: mol_type = other DNA
ctcccacaaaggctg

SEQ ID NO: 19442 - DNA, 15 bp, synthetic construct
  source 1..15: mol_type = other DNA
caggtgctctcttag

SEQ ID NO: 19443 - DNA, 15 bp, synthetic construct
  source 1..15: mol_type = other DNA
tgcctagaacatgac

SEQ ID NO: 19444 - DNA, 15 bp, synthetic construct
  source 1..15: mol_type = other DNA
aagtgcgcctgagag

SEQ ID NO: 19445 - DNA, 15 bp, synthetic construct
  source 1..15: mol_type = other DNA
tacccaaccatggac

SEQ ID NO: 19446 - DNA, 15 bp, synthetic construct
  source 1..15: mol_type = other DNA
gctgagtttcatttc

SEQ ID NO: 19447 - DNA, 15 bp, synthetic construct
  source 1..15: mol_type = other DNA
tactcccttatcctc

SEQ ID NO: 19448 - DNA, 15 bp, synthetic construct
  source 1..15: mol_type = other DNA
agccaagacaattgg

SEQ ID NO: 19449 - DNA, 15 bp, synthetic construct
  source 1..15: mol_type = other DNA
atcgtgcattcgagc

SEQ ID NO: 19450 - DNA, 15 bp, synthetic construct
  source 1..15: mol_type = other DNA
ctatgcttccaactg

SEQ ID NO: 19451 - DNA, 15 bp, synthetic construct
  source 1..15: mol_type = other DNA
gccttcaatttcttc

SEQ ID NO: 19452 - DNA, 15 bp, synthetic construct
  source 1..15: mol_type = other DNA
agtcctgaaataagt

SEQ ID NO: 19453 - DNA, 15 bp, synthetic construct
  source 1..15: mol_type = other DNA
catttccgaaaggcc

SEQ ID NO: 19454 - DNA, 15 bp, synthetic construct
  source 1..15: mol_type = other DNA
gcggcggtgatcaag

SEQ ID NO: 19455 - DNA, 15 bp, synthetic construct
  source 1..15: mol_type = other DNA
gccggtagcccttgg

SEQ ID NO: 19456 - DNA, 15 bp, synthetic construct
  source 1..15: mol_type = other DNA
tgatcggttggagct

SEQ ID NO: 19457 - DNA, 15 bp, synthetic construct
  source 1..15: mol_type = other DNA
agttcttacaaaaca

SEQ ID NO: 19458 - DNA, 15 bp, synthetic construct
  source 1..15: mol_type = other DNA
cactgtctccaagat

SEQ ID NO: 19459 - DNA, 15 bp, synthetic construct
  source 1..15: mol_type = other DNA
ctgcactgatacccg

SEQ ID NO: 19460 - DNA, 15 bp, synthetic construct
  source 1..15: mol_type = other DNA
gtacggacggaaaaa

SEQ ID NO: 19461 - DNA, 15 bp, synthetic construct
  source 1..15: mol_type = other DNA
tcattggtcttcacg

SEQ ID NO: 19462 - DNA, 15 bp, synthetic construct
  source 1..15: mol_type = other DNA
cctttctgtcctgtt

SEQ ID NO: 19463 - DNA, 15 bp, synthetic construct
  source 1..15: mol_type = other DNA
cacctggtgcctagc

SEQ ID NO: 19464 - DNA, 15 bp, synthetic construct
  source 1..15: mol_type = other DNA
gggaccctcgacatt

SEQ ID NO: 19465 - DNA, 15 bp, synthetic construct
  source 1..15: mol_type = other DNA
tcttcccacaccgtg

SEQ ID NO: 19466 - DNA, 15 bp, synthetic construct
  source 1..15: mol_type = other DNA
atgataaaggtctgg

SEQ ID NO: 19467 - DNA, 15 bp, synthetic construct
  source 1..15: mol_type = other DNA
caaaatggacataag

SEQ ID NO: 19468 - DNA, 15 bp, synthetic construct
  source 1..15: mol_type = other DNA
aacggttccgtggag

SEQ ID NO: 19469 - DNA, 15 bp, synthetic construct
  source 1..15: mol_type = other DNA
gaggatgagtcgttg

SEQ ID NO: 19470 - DNA, 15 bp, synthetic construct
  source 1..15: mol_type = other DNA
gatgatgtcatcgaa

SEQ ID NO: 19471 - DNA, 15 bp, synthetic construct
  source 1..15: mol_type = other DNA
gacttcctctacatc

SEQ ID NO: 19472 - DNA, 15 bp, synthetic construct
  source 1..15: mol_type = other DNA
agacgcagcattcgt

SEQ ID NO: 19473 - DNA, 15 bp, synthetic construct
  source 1..15: mol_type = other DNA
tccgaatatgttgct

SEQ ID NO: 19474 - DNA, 15 bp, synthetic construct
  source 1..15: mol_type = other DNA
ctcaagatgcattat

SEQ ID NO: 19475 - DNA, 15 bp, synthetic construct
  source 1..15: mol_type = other DNA
actggaacggtctct

SEQ ID NO: 19476 - DNA, 15 bp, synthetic construct
  source 1..15: mol_type = other DNA
agaacattgacaagg

SEQ ID NO: 19477 - DNA, 15 bp, synthetic construct
  source 1..15: mol_type = other DNA
tcgttgggatcagtg

SEQ ID NO: 19478 - DNA, 15 bp, synthetic construct
  source 1..15: mol_type = other DNA
ctctgtagggctacc

SEQ ID NO: 19479 - DNA, 15 bp, synthetic construct
  source 1..15: mol_type = other DNA
gattagtccccgaag

SEQ ID NO: 19480 - DNA, 15 bp, synthetic construct
  source 1..15: mol_type = other DNA
tgtggtcatcgcttc

SEQ ID NO: 19481 - DNA, 15 bp, synthetic construct
  source 1..15: mol_type = other DNA
tacagagagtgcata

SEQ ID NO: 19482 - DNA, 15 bp, synthetic construct
  source 1..15: mol_type = other DNA
acaagcacaagtgta

SEQ ID NO: 19483 - DNA, 15 bp, synthetic construct
  source 1..15: mol_type = other DNA
agctatcagtcccaa

SEQ ID NO: 19484 - DNA, 15 bp, synthetic construct
  source 1..15: mol_type = other DNA
tcccgaacgtcatgt

SEQ ID NO: 19485 - DNA, 15 bp, synthetic construct
  source 1..15: mol_type = other DNA
ctctggaagagcacc

SEQ ID NO: 19486 - DNA, 15 bp, synthetic construct
  source 1..15: mol_type = other DNA
ccacatgtctcagca

SEQ ID NO: 19487 - DNA, 15 bp, synthetic construct
  source 1..15: mol_type = other DNA
gcagaagggatgttg

SEQ ID NO: 19488 - DNA, 15 bp, synthetic construct
  source 1..15: mol_type = other DNA
cagctacagcagatc

SEQ ID NO: 19489 - DNA, 15 bp, synthetic construct
  source 1..15: mol_type = other DNA
acctggatgcggatc

SEQ ID NO: 19490 - DNA, 15 bp, synthetic construct
  source 1..15: mol_type = other DNA
ctaaagacagagaca

SEQ ID NO: 19491 - DNA, 15 bp, synthetic construct
  source 1..15: mol_type = other DNA
aaatagcttatgtcc

SEQ ID NO: 19492 - DNA, 15 bp, synthetic construct
  source 1..15: mol_type = other DNA
tccacctgtcctcat

SEQ ID NO: 19493 - DNA, 15 bp, synthetic construct
  source 1..15: mol_type = other DNA
cttctgaaggcacag

SEQ ID NO: 19494 - DNA, 15 bp, synthetic construct
  source 1..15: mol_type = other DNA
ttacttgggcagagt

SEQ ID NO: 19495 - DNA, 15 bp, synthetic construct
  source 1..15: mol_type = other DNA
atcccgcgtacgtcc

SEQ ID NO: 19496 - DNA, 15 bp, synthetic construct
  source 1..15: mol_type = other DNA
cccaactccaggaat

SEQ ID NO: 19497 - DNA, 15 bp, synthetic construct
  source 1..15: mol_type = other DNA
cctcgtcattctcac

SEQ ID NO: 19498 - DNA, 15 bp, synthetic construct
  source 1..15: mol_type = other DNA
ttctgcaattatgtt

SEQ ID NO: 19499 - DNA, 15 bp, synthetic construct
  source 1..15: mol_type = other DNA
aattacccctctctt

SEQ ID NO: 19500 - DNA, 15 bp, synthetic construct
  source 1..15: mol_type = other DNA
atacccaggtgttgg

SEQ ID NO: 19501 - DNA, 15 bp, synthetic construct
  source 1..15: mol_type = other DNA
ggtctaaactgactt

SEQ ID NO: 19502 - DNA, 15 bp, synthetic construct
  source 1..15: mol_type = other DNA
gccctttacctattt

SEQ ID NO: 19503 - DNA, 15 bp, synthetic construct
  source 1..15: mol_type = other DNA
agtctagggagatct

SEQ ID NO: 19504 - DNA, 15 bp, synthetic construct
  source 1..15: mol_type = other DNA
gcatttatttaatcc

SEQ ID NO: 19505 - DNA, 15 bp, synthetic construct
  source 1..15: mol_type = other DNA
gttttgtgtttacga

SEQ ID NO: 19506 - DNA, 15 bp, synthetic construct
  source 1..15: mol_type = other DNA
tatgtccatttggct

SEQ ID NO: 19507 - DNA, 15 bp, synthetic construct
  source 1..15: mol_type = other DNA
gcaaactcaaatcca

SEQ ID NO: 19508 - DNA, 15 bp, synthetic construct
  source 1..15: mol_type = other DNA
aggttttcttctgtg

SEQ ID NO: 19509 - DNA, 15 bp, synthetic construct
  source 1..15: mol_type = other DNA
aatgtggtgatgagg

SEQ ID NO: 19510 - DNA, 15 bp, synthetic construct
  source 1..15: mol_type = other DNA
tcagaataaaaaggc

SEQ ID NO: 19511 - DNA, 15 bp, synthetic construct
  source 1..15: mol_type = other DNA
ctgtgaagttctgta

SEQ ID NO: 19512 - DNA, 15 bp, synthetic construct
  source 1..15: mol_type = other DNA
ctccaactccagcat

SEQ ID NO: 19513 - DNA, 15 bp, synthetic construct
  source 1..15: mol_type = other DNA
tcacctgcaaaatca

SEQ ID NO: 19514 - DNA, 15 bp, synthetic construct
  source 1..15: mol_type = other DNA
ggccagtgaatatgc

SEQ ID NO: 19515 - DNA, 15 bp, synthetic construct
  source 1..15: mol_type = other DNA
gtgacttgaagctcc

SEQ ID NO: 19516 - DNA, 15 bp, synthetic construct
  source 1..15: mol_type = other DNA
ggttcctgaagttgc

SEQ ID NO: 19517 - DNA, 15 bp, synthetic construct
  source 1..15: mol_type = other DNA
ttcacaatttccagg

SEQ ID NO: 19518 - DNA, 15 bp, synthetic construct
  source 1..15: mol_type = other DNA
agtaccacaagaagt

SEQ ID NO: 19519 - DNA, 15 bp, synthetic construct
  source 1..15: mol_type = other DNA
catgcggaaaatctt

SEQ ID NO: 19520 - DNA, 15 bp, synthetic construct
  source 1..15: mol_type = other DNA
taaaccccttttcgc

SEQ ID NO: 19521 - DNA, 15 bp, synthetic construct
  source 1..15: mol_type = other DNA
gaggcgcgcatgtcg

SEQ ID NO: 19522 - DNA, 15 bp, synthetic construct
  source 1..15: mol_type = other DNA
tggtgacatctacgg

SEQ ID NO: 19523 - DNA, 15 bp, synthetic construct
  source 1..15: mol_type = other DNA
agtctcgccaccagc

SEQ ID NO: 19524 - DNA, 15 bp, synthetic construct
  source 1..15: mol_type = other DNA
ctagcacctcgtacc

SEQ ID NO: 19525 - DNA, 15 bp, synthetic construct
  source 1..15: mol_type = other DNA
tccagaaaaacttgg

SEQ ID NO: 19526 - DNA, 15 bp, synthetic construct
  source 1..15: mol_type = other DNA
acgactcaccgcttc

SEQ ID NO: 19527 - DNA, 15 bp, synthetic construct
  source 1..15: mol_type = other DNA
tgacatggcaatggg

SEQ ID NO: 19528 - DNA, 15 bp, synthetic construct
  source 1..15: mol_type = other DNA
ccacactctcttctc

SEQ ID NO: 19529 - DNA, 15 bp, synthetic construct
  source 1..15: mol_type = other DNA
atgagaaacaagact

SEQ ID NO: 19530 - DNA, 15 bp, synthetic construct
  source 1..15: mol_type = other DNA
cactgcctaagatgg

SEQ ID NO: 19531 - DNA, 15 bp, synthetic construct
  source 1..15: mol_type = other DNA
ccctcccacctaagc

SEQ ID NO: 19532 - DNA, 15 bp, synthetic construct
  source 1..15: mol_type = other DNA
gtaactactcttctg

SEQ ID NO: 19533 - DNA, 15 bp, synthetic construct
  source 1..15: mol_type = other DNA
ggctgcattaggact

SEQ ID NO: 19534 - DNA, 15 bp, synthetic construct
  source 1..15: mol_type = other DNA
gtgacctggctaacg

SEQ ID NO: 19535 - DNA, 15 bp, synthetic construct
  source 1..15: mol_type = other DNA
aggaagtgacataca

SEQ ID NO: 19536 - DNA, 15 bp, synthetic construct
  source 1..15: mol_type = other DNA
gatctacaaggacta

SEQ ID NO: 19537 - DNA, 15 bp, synthetic construct
  source 1..15: mol_type = other DNA
cgctgatccggaacg

SEQ ID NO: 19538 - DNA, 15 bp, synthetic construct
  source 1..15: mol_type = other DNA
gcaagatgcttggac

SEQ ID NO: 19539 - DNA, 15 bp, synthetic construct
  source 1..15: mol_type = other DNA
agtcatagggctgtg

SEQ ID NO: 19540 - DNA, 15 bp, synthetic construct
  source 1..15: mol_type = other DNA
gccgtcttcagtacc

SEQ ID NO: 19541 - DNA, 15 bp, synthetic construct
  source 1..15: mol_type = other DNA
ccgaggttgacgaag

SEQ ID NO: 19542 - DNA, 15 bp, synthetic construct
  source 1..15: mol_type = other DNA
tccattttgggcttg

SEQ ID NO: 19543 - DNA, 15 bp, synthetic construct
  source 1..15: mol_type = other DNA
catgggtgccgagtt

SEQ ID NO: 19544 - DNA, 15 bp, synthetic construct
  source 1..15: mol_type = other DNA
cgggtagcgcgtaga

SEQ ID NO: 19545 - DNA, 15 bp, synthetic construct
  source 1..15: mol_type = other DNA
ccaaatagacaccta

SEQ ID NO: 19546 - DNA, 15 bp, synthetic construct
  source 1..15: mol_type = other DNA
gccttcttccatctt

SEQ ID NO: 19547 - DNA, 15 bp, synthetic construct
  source 1..15: mol_type = other DNA
taggttacgcagcac

SEQ ID NO: 19548 - DNA, 15 bp, synthetic construct
  source 1..15: mol_type = other DNA
ggctgggctgaggac

SEQ ID NO: 19549 - DNA, 15 bp, synthetic construct
  source 1..15: mol_type = other DNA
tctccagccccaaaa

SEQ ID NO: 19550 - DNA, 15 bp, synthetic construct
  source 1..15: mol_type = other DNA
ggtttgcctccccat

SEQ ID NO: 19551 - DNA, 15 bp, synthetic construct
  source 1..15: mol_type = other DNA
gggagggtcaggcta

SEQ ID NO: 19552 - DNA, 15 bp, synthetic construct
  source 1..15: mol_type = other DNA
ttcttctccatcaca

SEQ ID NO: 19553 - DNA, 15 bp, synthetic construct
  source 1..15: mol_type = other DNA
aactgcaagtagggg

SEQ ID NO: 19554 - DNA, 15 bp, synthetic construct
  source 1..15: mol_type = other DNA
gcgggcctgttcttc

SEQ ID NO: 19555 - DNA, 15 bp, synthetic construct
  source 1..15: mol_type = other DNA
aactgcaagtagggg

SEQ ID NO: 19556 - DNA, 15 bp, synthetic construct
  source 1..15: mol_type = other DNA
gcgggcctgttcttc

SEQ ID NO: 19557 - DNA, 15 bp, synthetic construct
  source 1..15: mol_type = other DNA
aaagtgataactccc

SEQ ID NO: 19558 - DNA, 15 bp, synthetic construct
  source 1..15: mol_type = other DNA
gtgagaaccatcttg

SEQ ID NO: 19559 - DNA, 15 bp, synthetic construct
  source 1..15: mol_type = other DNA
gaaagggaacagtgg

SEQ ID NO: 19560 - DNA, 15 bp, synthetic construct
  source 1..15: mol_type = other DNA
cagccctaccctgac

SEQ ID NO: 19561 - DNA, 15 bp, synthetic construct
  source 1..15: mol_type = other DNA
aggatccggttcttc

SEQ ID NO: 19562 - DNA, 15 bp, synthetic construct
  source 1..15: mol_type = other DNA
caatggccacttcgt

SEQ ID NO: 19563 - DNA, 15 bp, synthetic construct
  source 1..15: mol_type = other DNA
aggatccggttcttc

SEQ ID NO: 19564 - DNA, 15 bp, synthetic construct
  source 1..15: mol_type = other DNA
caatggccacttcgt

SEQ ID NO: 19565 - DNA, 15 bp, synthetic construct
  source 1..15: mol_type = other DNA
agtcccgaggccttc

SEQ ID NO: 19566 - DNA, 15 bp, synthetic construct
  source 1..15: mol_type = other DNA
ataggaactggtaag

SEQ ID NO: 19567 - DNA, 15 bp, synthetic construct
  source 1..15: mol_type = other DNA
ggaggacgtgcatgg

SEQ ID NO: 19568 - DNA, 15 bp, synthetic construct
  source 1..15: mol_type = other DNA
cctgcattcaccatc

SEQ ID NO: 19569 - DNA, 15 bp, synthetic construct
  source 1..15: mol_type = other DNA
ggaggacgtgcatgg

SEQ ID NO: 19570 - DNA, 15 bp, synthetic construct
  source 1..15: mol_type = other DNA
cctgcattcaccatc

SEQ ID NO: 19571 - DNA, 15 bp, synthetic construct
  source 1..15: mol_type = other DNA
tggatggtgaatgca

SEQ ID NO: 19572 - DNA, 15 bp, synthetic construct
  source 1..15: mol_type = other DNA
ccagctggccttccg

SEQ ID NO: 19573 - DNA, 15 bp, synthetic construct
  source 1..15: mol_type = other DNA
gcagatcaaatacgc

SEQ ID NO: 19574 - DNA, 15 bp, synthetic construct
  source 1..15: mol_type = other DNA
tttacaacttcagtg

SEQ ID NO: 19575 - DNA, 15 bp, synthetic construct
  source 1..15: mol_type = other DNA
gcagatcaaatacgc

SEQ ID NO: 19576 - DNA, 15 bp, synthetic construct
  source 1..15: mol_type = other DNA
tttacaacttcagtg

SEQ ID NO: 19577 - DNA, 15 bp, synthetic construct
  source 1..15: mol_type = other DNA
tgcacgaagacgttg

SEQ ID NO: 19578 - DNA, 15 bp, synthetic construct
  source 1..15: mol_type = other DNA
tgtctcctctgaggt

SEQ ID NO: 19579 - DNA, 15 bp, synthetic construct
  source 1..15: mol_type = other DNA
aggagacagaggtcc

SEQ ID NO: 19580 - DNA, 15 bp, synthetic construct
  source 1..15: mol_type = other DNA
ggaatgagtctgggt

SEQ ID NO: 19581 - DNA, 15 bp, synthetic construct
  source 1..15: mol_type = other DNA
cagacaccccagtcc

SEQ ID NO: 19582 - DNA, 15 bp, synthetic construct
  source 1..15: mol_type = other DNA
ggcgctctcgaacgt

SEQ ID NO: 19583 - DNA, 15 bp, synthetic construct
  source 1..15: mol_type = other DNA
gagtagacgttgcca

SEQ ID NO: 19584 - DNA, 15 bp, synthetic construct
  source 1..15: mol_type = other DNA
gcggctgaacacgac

SEQ ID NO: 19585 - DNA, 15 bp, synthetic construct
  source 1..15: mol_type = other DNA
gagtagacgttgcca

SEQ ID NO: 19586 - DNA, 15 bp, synthetic construct
  source 1..15: mol_type = other DNA
gcggctgaacacgac

SEQ ID NO: 19587 - DNA, 15 bp, synthetic construct
  source 1..15: mol_type = other DNA
ccatccctgagtgcc

SEQ ID NO: 19588 - DNA, 15 bp, synthetic construct
  source 1..15: mol_type = other DNA
gaggtggcgccctga

SEQ ID NO: 19589 - DNA, 15 bp, synthetic construct
  source 1..15: mol_type = other DNA
ccagggccttgatgc

SEQ ID NO: 19590 - DNA, 15 bp, synthetic construct
  source 1..15: mol_type = other DNA
cgtggagcaggacaa

SEQ ID NO: 19591 - DNA, 15 bp, synthetic construct
  source 1..15: mol_type = other DNA
ccagggccttgatgc

SEQ ID NO: 19592 - DNA, 15 bp, synthetic construct
  source 1..15: mol_type = other DNA
cgtggagcaggacaa

SEQ ID NO: 19593 - DNA, 15 bp, synthetic construct
  source 1..15: mol_type = other DNA
ggcgtcggccagctc

SEQ ID NO: 19594 - DNA, 15 bp, synthetic construct
  source 1..15: mol_type = other DNA
agatggaacgatggg

SEQ ID NO: 19595 - DNA, 15 bp, synthetic construct
  source 1..15: mol_type = other DNA
cacctggatctacag

SEQ ID NO: 19596 - DNA, 15 bp, synthetic construct
  source 1..15: mol_type = other DNA
tgctgttgtatgact

SEQ ID NO: 19597 - DNA, 15 bp, synthetic construct
  source 1..15: mol_type = other DNA
cggcctttttcaggc

SEQ ID NO: 19598 - DNA, 15 bp, synthetic construct
  source 1..15: mol_type = other DNA
ctgaagcagcaggtg

SEQ ID NO: 19599 - DNA, 15 bp, synthetic construct
  source 1..15: mol_type = other DNA
gggcagggttagtgt

SEQ ID NO: 19600 - DNA, 15 bp, synthetic construct
  source 1..15: mol_type = other DNA
cgctgaccccagaat

SEQ ID NO: 19601 - DNA, 15 bp, synthetic construct
  source 1..15: mol_type = other DNA
atctgactgtcgaag

SEQ ID NO: 19602 - DNA, 15 bp, synthetic construct
  source 1..15: mol_type = other DNA
acgctgaatgaggag

SEQ ID NO: 19603 - DNA, 15 bp, synthetic construct
  source 1..15: mol_type = other DNA
atctgactgtcgaag

SEQ ID NO: 19604 - DNA, 15 bp, synthetic construct
  source 1..15: mol_type = other DNA
acgctgaatgaggag

SEQ ID NO: 19605 - DNA, 15 bp, synthetic construct
  source 1..15: mol_type = other DNA
tctcgaagttgtaga

SEQ ID NO: 19606 - DNA, 15 bp, synthetic construct
  source 1..15: mol_type = other DNA
tccccttggtccatc

SEQ ID NO: 19607 - DNA, 15 bp, synthetic construct
  source 1..15: mol_type = other DNA
tacagcaggacggac

SEQ ID NO: 19608 - DNA, 15 bp, synthetic construct
  source 1..15: mol_type = other DNA
gtttggccacatgtc

SEQ ID NO: 19609 - DNA, 15 bp, synthetic construct
  source 1..15: mol_type = other DNA
gatcatctgtctctc

SEQ ID NO: 19610 - DNA, 15 bp, synthetic construct
  source 1..15: mol_type = other DNA
gccacccgtctctcc

SEQ ID NO: 19611 - DNA, 15 bp, synthetic construct
  source 1..15: mol_type = other DNA
cagttggaggcatcc

SEQ ID NO: 19612 - DNA, 15 bp, synthetic construct
  source 1..15: mol_type = other DNA
gagcggtgcctggtc

SEQ ID NO: 19613 - DNA, 15 bp, synthetic construct
  source 1..15: mol_type = other DNA
acagagcctgagctc

SEQ ID NO: 19614 - DNA, 15 bp, synthetic construct
  source 1..15: mol_type = other DNA
gacatcagggagggt

SEQ ID NO: 19615 - DNA, 15 bp, synthetic construct
  source 1..15: mol_type = other DNA
agcgtccaccaccac

SEQ ID NO: 19616 - DNA, 15 bp, synthetic construct
  source 1..15: mol_type = other DNA
gcggtgcccctgatg

SEQ ID NO: 19617 - DNA, 15 bp, synthetic construct
  source 1..15: mol_type = other DNA
acctgagacctttgc

SEQ ID NO: 19618 - DNA, 15 bp, synthetic construct
  source 1..15: mol_type = other DNA
gatcgcacatgccaa

SEQ ID NO: 19619 - DNA, 15 bp, synthetic construct
  source 1..15: mol_type = other DNA
cgggtggcggtgtcc

SEQ ID NO: 19620 - DNA, 15 bp, synthetic construct
  source 1..15: mol_type = other DNA
gaagccaggatggtc

SEQ ID NO: 19621 - DNA, 15 bp, synthetic construct
  source 1..15: mol_type = other DNA
agtgctcaccaacca

SEQ ID NO: 19622 - DNA, 15 bp, synthetic construct
  source 1..15: mol_type = other DNA
ctgcaattgtatact

SEQ ID NO: 19623 - DNA, 15 bp, synthetic construct
  source 1..15: mol_type = other DNA
cctgggagctcagat

SEQ ID NO: 19624 - DNA, 15 bp, synthetic construct
  source 1..15: mol_type = other DNA
ctcacttcccctcag

SEQ ID NO: 19625 - DNA, 15 bp, synthetic construct
  source 1..15: mol_type = other DNA
ccaccgtctgtggat

SEQ ID NO: 19626 - DNA, 15 bp, synthetic construct
  source 1..15: mol_type = other DNA
accaggaccgcctca

SEQ ID NO: 19627 - DNA, 15 bp, synthetic construct
  source 1..15: mol_type = other DNA
ttggaggcctcgatg

SEQ ID NO: 19628 - DNA, 15 bp, synthetic construct
  source 1..15: mol_type = other DNA
ggagcagtacaccca

SEQ ID NO: 19629 - DNA, 15 bp, synthetic construct
  source 1..15: mol_type = other DNA
tttgaggacaacggc

SEQ ID NO: 19630 - DNA, 15 bp, synthetic construct
  source 1..15: mol_type = other DNA
aggatgcagaccttc

SEQ ID NO: 19631 - DNA, 15 bp, synthetic construct
  source 1..15: mol_type = other DNA
ctagacgcagcttgc

SEQ ID NO: 19632 - DNA, 15 bp, synthetic construct
  source 1..15: mol_type = other DNA
gtcgtggatcaggtg

SEQ ID NO: 19633 - DNA, 15 bp, synthetic construct
  source 1..15: mol_type = other DNA
tccacgaccctgagg

SEQ ID NO: 19634 - DNA, 15 bp, synthetic construct
  source 1..15: mol_type = other DNA
ccttcagcaaaggaa

SEQ ID NO: 19635 - DNA, 15 bp, synthetic construct
  source 1..15: mol_type = other DNA
gcaatctgaagacgc

SEQ ID NO: 19636 - DNA, 15 bp, synthetic construct
  source 1..15: mol_type = other DNA
tacccctcattgtcc

SEQ ID NO: 19637 - DNA, 15 bp, synthetic construct
  source 1..15: mol_type = other DNA
cctcaccagggcttc

SEQ ID NO: 19638 - DNA, 15 bp, synthetic construct
  source 1..15: mol_type = other DNA
ccaccctcaccctgg

SEQ ID NO: 19639 - DNA, 15 bp, synthetic construct
  source 1..15: mol_type = other DNA
ctcccccttggagct

SEQ ID NO: 19640 - DNA, 15 bp, synthetic construct
  source 1..15: mol_type = other DNA
ggcagaggtgcacta

SEQ ID NO: 19641 - DNA, 15 bp, synthetic construct
  source 1..15: mol_type = other DNA
tcctgcctgttcttc

SEQ ID NO: 19642 - DNA, 15 bp, synthetic construct
  source 1..15: mol_type = other DNA
cccgaccctcgccta

SEQ ID NO: 19643 - DNA, 15 bp, synthetic construct
  source 1..15: mol_type = other DNA
tgaatgaggacaagc

SEQ ID NO: 19644 - DNA, 15 bp, synthetic construct
  source 1..15: mol_type = other DNA
gcaggtactgagcgt

SEQ ID NO: 19645 - DNA, 15 bp, synthetic construct
  source 1..15: mol_type = other DNA
caggacgctcagtac

SEQ ID NO: 19646 - DNA, 15 bp, synthetic construct
  source 1..15: mol_type = other DNA
cactgacctgtgacc

SEQ ID NO: 19647 - DNA, 15 bp, synthetic construct
  source 1..15: mol_type = other DNA
ggctgtgtgggactt

SEQ ID NO: 19648 - DNA, 15 bp, synthetic construct
  source 1..15: mol_type = other DNA
ccatgctcacccaag

SEQ ID NO: 19649 - DNA, 15 bp, synthetic construct
  source 1..15: mol_type = other DNA
ccgccctcctgtgac

SEQ ID NO: 19650 - DNA, 15 bp, synthetic construct
  source 1..15: mol_type = other DNA
gggacagtcttgagg

SEQ ID NO: 19651 - DNA, 15 bp, synthetic construct
  source 1..15: mol_type = other DNA
ctatcagattctccc

SEQ ID NO: 19652 - DNA, 15 bp, synthetic construct
  source 1..15: mol_type = other DNA
agggcttaggagggt

SEQ ID NO: 19653 - DNA, 15 bp, synthetic construct
  source 1..15: mol_type = other DNA
acagcctacttacgg

SEQ ID NO: 19654 - DNA, 15 bp, synthetic construct
  source 1..15: mol_type = other DNA
ctcttcagcgactgc

SEQ ID NO: 19655 - DNA, 15 bp, synthetic construct
  source 1..15: mol_type = other DNA
cgttgccgtagaagc

SEQ ID NO: 19656 - DNA, 15 bp, synthetic construct
  source 1..15: mol_type = other DNA
ccccaggatatgcga

SEQ ID NO: 19657 - DNA, 15 bp, synthetic construct
  source 1..15: mol_type = other DNA
ccaccctcgcatatc

SEQ ID NO: 19658 - DNA, 15 bp, synthetic construct
  source 1..15: mol_type = other DNA
tccagccggagcaca

SEQ ID NO: 19659 - DNA, 15 bp, synthetic construct
  source 1..15: mol_type = other DNA
ggtgaagggagcctg

SEQ ID NO: 19660 - DNA, 15 bp, synthetic construct
  source 1..15: mol_type = other DNA
ctcggcagtaggatg

SEQ ID NO: 19661 - DNA, 15 bp, synthetic construct
  source 1..15: mol_type = other DNA
ggcacacttgactgt

SEQ ID NO: 19662 - DNA, 15 bp, synthetic construct
  source 1..15: mol_type = other DNA
cttgtgagcttgcag

SEQ ID NO: 19663 - DNA, 15 bp, synthetic construct
  source 1..15: mol_type = other DNA
ggtgacaggaagtgg

SEQ ID NO: 19664 - DNA, 15 bp, synthetic construct
  source 1..15: mol_type = other DNA
gcagctgcagatccg

SEQ ID NO: 19665 - DNA, 15 bp, synthetic construct
  source 1..15: mol_type = other DNA
cgaggagatctgtga

SEQ ID NO: 19666 - DNA, 15 bp, synthetic construct
  source 1..15: mol_type = other DNA
ctgtcccattgagtg

SEQ ID NO: 19667 - DNA, 15 bp, synthetic construct
  source 1..15: mol_type = other DNA
gagctgaggtccatg

SEQ ID NO: 19668 - DNA, 15 bp, synthetic construct
  source 1..15: mol_type = other DNA
gagctgagatgatgt

SEQ ID NO: 19669 - DNA, 15 bp, synthetic construct
  source 1..15: mol_type = other DNA
ggtgtcatcctacgg

SEQ ID NO: 19670 - DNA, 15 bp, synthetic construct
  source 1..15: mol_type = other DNA
ggtgtcatcctacgg

SEQ ID NO: 19671 - DNA, 15 bp, synthetic construct
  source 1..15: mol_type = other DNA
tgctcatctggttgc

SEQ ID NO: 19672 - DNA, 15 bp, synthetic construct
  source 1..15: mol_type = other DNA
ggtgtcatcctacgg

SEQ ID NO: 19673 - DNA, 15 bp, synthetic construct
  source 1..15: mol_type = other DNA
aacggagggtcccac

SEQ ID NO: 19674 - DNA, 15 bp, synthetic construct
  source 1..15: mol_type = other DNA
agcgcaagtatccag

SEQ ID NO: 19675 - DNA, 15 bp, synthetic construct
  source 1..15: mol_type = other DNA
gcgctcattccctac

SEQ ID NO: 19676 - DNA, 15 bp, synthetic construct
  source 1..15: mol_type = other DNA
ccccgagctgtactg

SEQ ID NO: 19677 - DNA, 15 bp, synthetic construct
  source 1..15: mol_type = other DNA
atgccctgcttaccc

SEQ ID NO: 19678 - DNA, 15 bp, synthetic construct
  source 1..15: mol_type = other DNA
actggatgcaagatg

SEQ ID NO: 19679 - DNA, 15 bp, synthetic construct
  source 1..15: mol_type = other DNA
caatgccctcagtcc

SEQ ID NO: 19680 - DNA, 15 bp, synthetic construct
  source 1..15: mol_type = other DNA
gagagtcatccccat

SEQ ID NO: 19681 - DNA, 15 bp, synthetic construct
  source 1..15: mol_type = other DNA
actttcagctgatga

SEQ ID NO: 19682 - DNA, 15 bp, synthetic construct
  source 1..15: mol_type = other DNA
cactttggtgtgagt

SEQ ID NO: 19683 - DNA, 15 bp, synthetic construct
  source 1..15: mol_type = other DNA
aaatgctgtccttaa

SEQ ID NO: 19684 - DNA, 15 bp, synthetic construct
  source 1..15: mol_type = other DNA
aggagtgtaactgct

SEQ ID NO: 19685 - DNA, 15 bp, synthetic construct
  source 1..15: mol_type = other DNA
gtgagctcctggatg

SEQ ID NO: 19686 - DNA, 15 bp, synthetic construct
  source 1..15: mol_type = other DNA
ctagggctgcattct

SEQ ID NO: 19687 - DNA, 15 bp, synthetic construct
  source 1..15: mol_type = other DNA
tcctgaccctgcttt

SEQ ID NO: 19688 - DNA, 15 bp, synthetic construct
  source 1..15: mol_type = other DNA
gttctgccgaaacgc

SEQ ID NO: 19689 - DNA, 15 bp, synthetic construct
  source 1..15: mol_type = other DNA
gctccgttgttatag

SEQ ID NO: 19690 - DNA, 15 bp, synthetic construct
  source 1..15: mol_type = other DNA
gattatgtactcgtg

SEQ ID NO: 19691 - DNA, 15 bp, synthetic construct
  source 1..15: mol_type = other DNA
gctccgttgttatag

SEQ ID NO: 19692 - DNA, 15 bp, synthetic construct
  source 1..15: mol_type = other DNA
gattatgtactcgtg

SEQ ID NO: 19693 - DNA, 15 bp, synthetic construct
  source 1..15: mol_type = other DNA
caaagctgtagacgt

SEQ ID NO: 19694 - DNA, 15 bp, synthetic construct
  source 1..15: mol_type = other DNA
gaggtctcatgaatg

SEQ ID NO: 19695 - DNA, 15 bp, synthetic construct
  source 1..15: mol_type = other DNA
ccacagtggtaatga

SEQ ID NO: 19696 - DNA, 15 bp, synthetic construct
  source 1..15: mol_type = other DNA
cctctgggtgtcttg

SEQ ID NO: 19697 - DNA, 15 bp, synthetic construct
  source 1..15: mol_type = other DNA
gcctgtcgctcatag

SEQ ID NO: 19698 - DNA, 15 bp, synthetic construct
  source 1..15: mol_type = other DNA
agcctgctcactagg

SEQ ID NO: 19699 - DNA, 15 bp, synthetic construct
  source 1..15: mol_type = other DNA
cccccgtccctctag

SEQ ID NO: 19700 - DNA, 15 bp, synthetic construct
  source 1..15: mol_type = other DNA
ccggctctgactcac

SEQ ID NO: 19701 - DNA, 15 bp, synthetic construct
  source 1..15: mol_type = other DNA
ggcggcactggtgag

SEQ ID NO: 19702 - DNA, 15 bp, synthetic construct
  source 1..15: mol_type = other DNA
gggcgttgcagcatc

SEQ ID NO: 19703 - DNA, 15 bp, synthetic construct
  source 1..15: mol_type = other DNA
tcccctctcatgcat

SEQ ID NO: 19704 - DNA, 15 bp, synthetic construct
  source 1..15: mol_type = other DNA
tacaggtgagtggga

SEQ ID NO: 19705 - DNA, 15 bp, synthetic construct
  source 1..15: mol_type = other DNA
tccaggtggaagaca

SEQ ID NO: 19706 - DNA, 15 bp, synthetic construct
  source 1..15: mol_type = other DNA
gccaggccgctatgc

SEQ ID NO: 19707 - DNA, 15 bp, synthetic construct
  source 1..15: mol_type = other DNA
tccaggtggaagaca

SEQ ID NO: 19708 - DNA, 15 bp, synthetic construct
  source 1..15: mol_type = other DNA
gccaggccgctatgc

SEQ ID NO: 19709 - DNA, 15 bp, synthetic construct
  source 1..15: mol_type = other DNA
ctcattggcgtactc

SEQ ID NO: 19710 - DNA, 15 bp, synthetic construct
  source 1..15: mol_type = other DNA
taggattggctgtgg

SEQ ID NO: 19711 - DNA, 15 bp, synthetic construct
  source 1..15: mol_type = other DNA
ccaaggtcctgcaac

SEQ ID NO: 19712 - DNA, 15 bp, synthetic construct
  source 1..15: mol_type = other DNA
tcaggctgtctctgg

SEQ ID NO: 19713 - DNA, 15 bp, synthetic construct
  source 1..15: mol_type = other DNA
caggccgtggtcagc

SEQ ID NO: 19714 - DNA, 15 bp, synthetic construct
  source 1..15: mol_type = other DNA
ctctcagcaccacct

SEQ ID NO: 19715 - DNA, 15 bp, synthetic construct
  source 1..15: mol_type = other DNA
tcctgcagggtggag

SEQ ID NO: 19716 - DNA, 15 bp, synthetic construct
  source 1..15: mol_type = other DNA
ctgggctcaggagtc

SEQ ID NO: 19717 - DNA, 15 bp, synthetic construct
  source 1..15: mol_type = other DNA
acccacatgagccag

SEQ ID NO: 19718 - DNA, 15 bp, synthetic construct
  source 1..15: mol_type = other DNA
tgacccgacgctcca

SEQ ID NO: 19719 - DNA, 15 bp, synthetic construct
  source 1..15: mol_type = other DNA
cagcctggccacgat

SEQ ID NO: 19720 - DNA, 15 bp, synthetic construct
  source 1..15: mol_type = other DNA
ctttggcttcaaccc

SEQ ID NO: 19721 - DNA, 15 bp, synthetic construct
  source 1..15: mol_type = other DNA
cagcctggccacgat

SEQ ID NO: 19722 - DNA, 15 bp, synthetic construct
  source 1..15: mol_type = other DNA
ctttggcttcaaccc

SEQ ID NO: 19723 - DNA, 15 bp, synthetic construct
  source 1..15: mol_type = other DNA
ctccagctgaagttc

SEQ ID NO: 19724 - DNA, 15 bp, synthetic construct
  source 1..15: mol_type = other DNA
aggatggccaagctg

SEQ ID NO: 19725 - DNA, 15 bp, synthetic construct
  source 1..15: mol_type = other DNA
cttggccatcctacc

SEQ ID NO: 19726 - DNA, 15 bp, synthetic construct
  source 1..15: mol_type = other DNA
cattggcggtgcact

SEQ ID NO: 19727 - DNA, 15 bp, synthetic construct
  source 1..15: mol_type = other DNA
cggttcacagctctg

SEQ ID NO: 19728 - DNA, 15 bp, synthetic construct
  source 1..15: mol_type = other DNA
cactaacagatccca

SEQ ID NO: 19729 - DNA, 15 bp, synthetic construct
  source 1..15: mol_type = other DNA
ttccccagcataaac

SEQ ID NO: 19730 - DNA, 15 bp, synthetic construct
  source 1..15: mol_type = other DNA
aggaccaaggtgtgg

SEQ ID NO: 19731 - DNA, 15 bp, synthetic construct
  source 1..15: mol_type = other DNA
tggtcctcagactca

SEQ ID NO: 19732 - DNA, 15 bp, synthetic construct
  source 1..15: mol_type = other DNA
tagagggagtgtcag

SEQ ID NO: 19733 - DNA, 15 bp, synthetic construct
  source 1..15: mol_type = other DNA
cctccaggatatact

SEQ ID NO: 19734 - DNA, 15 bp, synthetic construct
  source 1..15: mol_type = other DNA
ctctatggctctatg

SEQ ID NO: 19735 - DNA, 15 bp, synthetic construct
  source 1..15: mol_type = other DNA
ctcgggacttttagc

SEQ ID NO: 19736 - DNA, 15 bp, synthetic construct
  source 1..15: mol_type = other DNA
caggccgtccatgtg

SEQ ID NO: 19737 - DNA, 15 bp, synthetic construct
  source 1..15: mol_type = other DNA
aggcagcgtgtgaac

SEQ ID NO: 19738 - DNA, 15 bp, synthetic construct
  source 1..15: mol_type = other DNA
caggtgcagtctcca

SEQ ID NO: 19739 - DNA, 15 bp, synthetic construct
  source 1..15: mol_type = other DNA
gcacgcagtggagac

SEQ ID NO: 19740 - DNA, 15 bp, synthetic construct
  source 1..15: mol_type = other DNA
gagcagagggtcagg

SEQ ID NO: 19741 - DNA, 15 bp, synthetic construct
  source 1..15: mol_type = other DNA
gtgggtggcagaacc

SEQ ID NO: 19742 - DNA, 15 bp, synthetic construct
  source 1..15: mol_type = other DNA
cgtgggcgtgggtag

SEQ ID NO: 19743 - DNA, 15 bp, synthetic construct
  source 1..15: mol_type = other DNA
gtgtcacggtaggcc

SEQ ID NO: 19744 - DNA, 15 bp, synthetic construct
  source 1..15: mol_type = other DNA
gcgctcgaggtggac

SEQ ID NO: 19745 - DNA, 15 bp, synthetic construct
  source 1..15: mol_type = other DNA
cccacatgcttggtc

SEQ ID NO: 19746 - DNA, 15 bp, synthetic construct
  source 1..15: mol_type = other DNA
tgcagggcatctgag

SEQ ID NO: 19747 - DNA, 15 bp, synthetic construct
  source 1..15: mol_type = other DNA
tgaaaatcctccctt

SEQ ID NO: 19748 - DNA, 15 bp, synthetic construct
  source 1..15: mol_type = other DNA
cctgcatctccgatt

SEQ ID NO: 19749 - DNA, 15 bp, synthetic construct
  source 1..15: mol_type = other DNA
gtgtctgtttggatg

SEQ ID NO: 19750 - DNA, 15 bp, synthetic construct
  source 1..15: mol_type = other DNA
gactgccacatcttg

SEQ ID NO: 19751 - DNA, 15 bp, synthetic construct
  source 1..15: mol_type = other DNA
tctttccaggcagac

SEQ ID NO: 19752 - DNA, 15 bp, synthetic construct
  source 1..15: mol_type = other DNA
atcgactgccaggtg

SEQ ID NO: 19753 - DNA, 15 bp, synthetic construct
  source 1..15: mol_type = other DNA
aatggccgttgagtc

SEQ ID NO: 19754 - DNA, 15 bp, synthetic construct
  source 1..15: mol_type = other DNA
cctgtaactgctacg

SEQ ID NO: 19755 - DNA, 15 bp, synthetic construct
  source 1..15: mol_type = other DNA
tcgtagtaacagtcg

SEQ ID NO: 19756 - DNA, 15 bp, synthetic construct
  source 1..15: mol_type = other DNA
acagtgccaacgagt

SEQ ID NO: 19757 - DNA, 15 bp, synthetic construct
  source 1..15: mol_type = other DNA
tcgtagtaacagtcg

SEQ ID NO: 19758 - DNA, 15 bp, synthetic construct
  source 1..15: mol_type = other DNA
acagtgccaacgagt

SEQ ID NO: 19759 - DNA, 15 bp, synthetic construct
  source 1..15: mol_type = other DNA
tggcacgccctccac

SEQ ID NO: 19760 - DNA, 15 bp, synthetic construct
  source 1..15: mol_type = other DNA
actgagcacctgcca

SEQ ID NO: 19761 - DNA, 15 bp, synthetic construct
  source 1..15: mol_type = other DNA
gtcacccaccctcag

SEQ ID NO: 19762 - DNA, 15 bp, synthetic construct
  source 1..15: mol_type = other DNA
actggccgggtggac

SEQ ID NO: 19763 - DNA, 15 bp, synthetic construct
  source 1..15: mol_type = other DNA
gagtcccgggtccac

SEQ ID NO: 19764 - DNA, 15 bp, synthetic construct
  source 1..15: mol_type = other DNA
gccacactggcgtca

SEQ ID NO: 19765 - DNA, 15 bp, synthetic construct
  source 1..15: mol_type = other DNA
tttcccttctccagc

SEQ ID NO: 19766 - DNA, 15 bp, synthetic construct
  source 1..15: mol_type = other DNA
ccaggcttttctggt

SEQ ID NO: 19767 - DNA, 15 bp, synthetic construct
  source 1..15: mol_type = other DNA
gaagcctggtcacgg

SEQ ID NO: 19768 - DNA, 15 bp, synthetic construct
  source 1..15: mol_type = other DNA
agcatgggaatccag

SEQ ID NO: 19769 - DNA, 15 bp, synthetic construct
  source 1..15: mol_type = other DNA
aaaggtgaccactgc

SEQ ID NO: 19770 - DNA, 15 bp, synthetic construct
  source 1..15: mol_type = other DNA
cgaggtcaacgtcac

SEQ ID NO: 19771 - DNA, 15 bp, synthetic construct
  source 1..15: mol_type = other DNA
agggtccctacctgg

SEQ ID NO: 19772 - DNA, 15 bp, synthetic construct
  source 1..15: mol_type = other DNA
tctgaccctcccgtt

SEQ ID NO: 19773 - DNA, 15 bp, synthetic construct
  source 1..15: mol_type = other DNA
tcgggccggtgttcc

SEQ ID NO: 19774 - DNA, 15 bp, synthetic construct
  source 1..15: mol_type = other DNA
cctgcacccgcccta

SEQ ID NO: 19775 - DNA, 15 bp, synthetic construct
  source 1..15: mol_type = other DNA
cctcggccaggttga

SEQ ID NO: 19776 - DNA, 15 bp, synthetic construct
  source 1..15: mol_type = other DNA
cgcctggcttcagac

SEQ ID NO: 19777 - DNA, 15 bp, synthetic construct
  source 1..15: mol_type = other DNA
gcggtcggatcggtc

SEQ ID NO: 19778 - DNA, 15 bp, synthetic construct
  source 1..15: mol_type = other DNA
tctgtgggccgacgt

SEQ ID NO: 19779 - DNA, 15 bp, synthetic construct
  source 1..15: mol_type = other DNA
tgcagttgaggtact

SEQ ID NO: 19780 - DNA, 15 bp, synthetic construct
  source 1..15: mol_type = other DNA
ttccgcgcgccctac

SEQ ID NO: 19781 - DNA, 15 bp, synthetic construct
  source 1..15: mol_type = other DNA
tcccgcgacaactcg

SEQ ID NO: 19782 - DNA, 15 bp, synthetic construct
  source 1..15: mol_type = other DNA
ctgctcccgggatta

SEQ ID NO: 19783 - DNA, 15 bp, synthetic construct
  source 1..15: mol_type = other DNA
aggccgtcgaactcg

SEQ ID NO: 19784 - DNA, 15 bp, synthetic construct
  source 1..15: mol_type = other DNA
tggaaggagctgaac

SEQ ID NO: 19785 - DNA, 15 bp, synthetic construct
  source 1..15: mol_type = other DNA
cgttcggcttcctcc

SEQ ID NO: 19786 - DNA, 15 bp, synthetic construct
  source 1..15: mol_type = other DNA
agatgctgggtgagc

SEQ ID NO: 19787 - DNA, 15 bp, synthetic construct
  source 1..15: mol_type = other DNA
cgccagtgagtggaa

SEQ ID NO: 19788 - DNA, 15 bp, synthetic construct
  source 1..15: mol_type = other DNA
tcatggtgtgggcaa

SEQ ID NO: 19789 - DNA, 15 bp, synthetic construct
  source 1..15: mol_type = other DNA
tgagccagccgcttg

SEQ ID NO: 19790 - DNA, 15 bp, synthetic construct
  source 1..15: mol_type = other DNA
ccgcgactgtgcatg

SEQ ID NO: 19791 - DNA, 15 bp, synthetic construct
  source 1..15: mol_type = other DNA
gccgcgcgtgtcagc

SEQ ID NO: 19792 - DNA, 15 bp, synthetic construct
  source 1..15: mol_type = other DNA
ggccctgagccgcta

SEQ ID NO: 19793 - DNA, 15 bp, synthetic construct
  source 1..15: mol_type = other DNA
catcaccagtaacca

SEQ ID NO: 19794 - DNA, 15 bp, synthetic construct
  source 1..15: mol_type = other DNA
ccatatgggaaataa

SEQ ID NO: 19795 - DNA, 15 bp, synthetic construct
  source 1..15: mol_type = other DNA
catttgcgctgtgtg

SEQ ID NO: 19796 - DNA, 15 bp, synthetic construct
  source 1..15: mol_type = other DNA
ttgaccaaaaccaac

SEQ ID NO: 19797 - DNA, 15 bp, synthetic construct
  source 1..15: mol_type = other DNA
tttgaagcatgtaat

SEQ ID NO: 19798 - DNA, 15 bp, synthetic construct
  source 1..15: mol_type = other DNA
aggacattttcatac

SEQ ID NO: 19799 - DNA, 15 bp, synthetic construct
  source 1..15: mol_type = other DNA
tcacaggagttttta

SEQ ID NO: 19800 - DNA, 15 bp, synthetic construct
  source 1..15: mol_type = other DNA
ttaatgttctgaaac

SEQ ID NO: 19801 - DNA, 15 bp, synthetic construct
  source 1..15: mol_type = other DNA
acacagttttctgag

SEQ ID NO: 19802 - DNA, 15 bp, synthetic construct
  source 1..15: mol_type = other DNA
actgagccattagaa

SEQ ID NO: 19803 - DNA, 15 bp, synthetic construct
  source 1..15: mol_type = other DNA
gttgtttttcatctt

SEQ ID NO: 19804 - DNA, 15 bp, synthetic construct
  source 1..15: mol_type = other DNA
agaatggtctgctaa

SEQ ID NO: 19805 - DNA, 15 bp, synthetic construct
  source 1..15: mol_type = other DNA
tcttgattttgtctt

SEQ ID NO: 19806 - DNA, 15 bp, synthetic construct
  source 1..15: mol_type = other DNA
tttaagtgaacaaat

SEQ ID NO: 19807 - DNA, 15 bp, synthetic construct
  source 1..15: mol_type = other DNA
aggctcagattttat

SEQ ID NO: 19808 - DNA, 15 bp, synthetic construct
  source 1..15: mol_type = other DNA
aacaaatgcagttga

SEQ ID NO: 19809 - DNA, 15 bp, synthetic construct
  source 1..15: mol_type = other DNA
ttgactactaaatgc

SEQ ID NO: 19810 - DNA, 15 bp, synthetic construct
  source 1..15: mol_type = other DNA
cgtttagtgccagta

SEQ ID NO: 19811 - DNA, 15 bp, synthetic construct
  source 1..15: mol_type = other DNA
cattgtgctaaattt

SEQ ID NO: 19812 - DNA, 15 bp, synthetic construct
  source 1..15: mol_type = other DNA
acatcaagcaaagca

SEQ ID NO: 19813 - DNA, 15 bp, synthetic construct
  source 1..15: mol_type = other DNA
gttgagagagattga

SEQ ID NO: 19814 - DNA, 15 bp, synthetic construct
  source 1..15: mol_type = other DNA
tcacaccagaaagta

SEQ ID NO: 19815 - DNA, 15 bp, synthetic construct
  source 1..15: mol_type = other DNA
ggccaagtagcaatt

SEQ ID NO: 19816 - DNA, 15 bp, synthetic construct
  source 1..15: mol_type = other DNA
agatgacagcagtgg

SEQ ID NO: 19817 - DNA, 15 bp, synthetic construct
  source 1..15: mol_type = other DNA
acagttggaataaga

SEQ ID NO: 19818 - DNA, 15 bp, synthetic construct
  source 1..15: mol_type = other DNA
taaaaatgcaggtta

SEQ ID NO: 19819 - DNA, 15 bp, synthetic construct
  source 1..15: mol_type = other DNA
attgtttctttccag

SEQ ID NO: 19820 - DNA, 15 bp, synthetic construct
  source 1..15: mol_type = other DNA
tcaagcagcaagtga

SEQ ID NO: 19821 - DNA, 15 bp, synthetic construct
  source 1..15: mol_type = other DNA
caatctggccatagc

SEQ ID NO: 19822 - DNA, 15 bp, synthetic construct
  source 1..15: mol_type = other DNA
agtggaacaaaggtc

SEQ ID NO: 19823 - DNA, 15 bp, synthetic construct
  source 1..15: mol_type = other DNA
cagcacatgacaacg

SEQ ID NO: 19824 - DNA, 15 bp, synthetic construct
  source 1..15: mol_type = other DNA
tgattctttaaaagt

SEQ ID NO: 19825 - DNA, 15 bp, synthetic construct
  source 1..15: mol_type = other DNA
accatagcaccttaa

SEQ ID NO: 19826 - DNA, 15 bp, synthetic construct
  source 1..15: mol_type = other DNA
tctgattctatcatg

SEQ ID NO: 19827 - DNA, 15 bp, synthetic construct
  source 1..15: mol_type = other DNA
agcttccttctttac

SEQ ID NO: 19828 - DNA, 15 bp, synthetic construct
  source 1..15: mol_type = other DNA
ctggcagtgcatttc

SEQ ID NO: 19829 - DNA, 15 bp, synthetic construct
  source 1..15: mol_type = other DNA
actggaccattactt

SEQ ID NO: 19830 - DNA, 15 bp, synthetic construct
  source 1..15: mol_type = other DNA
agcccttgtgaacac

SEQ ID NO: 19831 - DNA, 15 bp, synthetic construct
  source 1..15: mol_type = other DNA
ctagtattagtcctc

SEQ ID NO: 19832 - DNA, 15 bp, synthetic construct
  source 1..15: mol_type = other DNA
atctggtcccaaagt

SEQ ID NO: 19833 - DNA, 15 bp, synthetic construct
  source 1..15: mol_type = other DNA
ctgtggaaatagtgt

SEQ ID NO: 19834 - DNA, 15 bp, synthetic construct
  source 1..15: mol_type = other DNA
ccatctcgtctttgc

SEQ ID NO: 19835 - DNA, 15 bp, synthetic construct
  source 1..15: mol_type = other DNA
ggatttctgtcagct

SEQ ID NO: 19836 - DNA, 15 bp, synthetic construct
  source 1..15: mol_type = other DNA
atgttctccttttat

SEQ ID NO: 19837 - DNA, 15 bp, synthetic construct
  source 1..15: mol_type = other DNA
agtatttacaggcta

SEQ ID NO: 19838 - DNA, 15 bp, synthetic construct
  source 1..15: mol_type = other DNA
gtagcttcagtttga

SEQ ID NO: 19839 - DNA, 15 bp, synthetic construct
  source 1..15: mol_type = other DNA
gagttttccatagct

SEQ ID NO: 19840 - DNA, 15 bp, synthetic construct
  source 1..15: mol_type = other DNA
agacagaattacctc

SEQ ID NO: 19841 - DNA, 15 bp, synthetic construct
  source 1..15: mol_type = other DNA
tgtgaatggtgttga

SEQ ID NO: 19842 - DNA, 15 bp, synthetic construct
  source 1..15: mol_type = other DNA
taaaaactcagccta

SEQ ID NO: 19843 - DNA, 15 bp, synthetic construct
  source 1..15: mol_type = other DNA
gcctcagatttgttg

SEQ ID NO: 19844 - DNA, 15 bp, synthetic construct
  source 1..15: mol_type = other DNA
aaacttcccatttaa

SEQ ID NO: 19845 - DNA, 15 bp, synthetic construct
  source 1..15: mol_type = other DNA
aactttaccaggctg

SEQ ID NO: 19846 - DNA, 15 bp, synthetic construct
  source 1..15: mol_type = other DNA
atatctatgacccaa

SEQ ID NO: 19847 - DNA, 15 bp, synthetic construct
  source 1..15: mol_type = other DNA
gattgcatgaggtca

SEQ ID NO: 19848 - DNA, 15 bp, synthetic construct
  source 1..15: mol_type = other DNA
acccatgaggccaca

SEQ ID NO: 19849 - DNA, 15 bp, synthetic construct
  source 1..15: mol_type = other DNA
catgaaaccggatta

SEQ ID NO: 19850 - DNA, 15 bp, synthetic construct
  source 1..15: mol_type = other DNA
tatactccgcataca

SEQ ID NO: 19851 - DNA, 15 bp, synthetic construct
  source 1..15: mol_type = other DNA
tgatgacattccaat

SEQ ID NO: 19852 - DNA, 15 bp, synthetic construct
  source 1..15: mol_type = other DNA
tgatctacagatgtt

SEQ ID NO: 19853 - DNA, 15 bp, synthetic construct
  source 1..15: mol_type = other DNA
gcagtggtatatctg

SEQ ID NO: 19854 - DNA, 15 bp, synthetic construct
  source 1..15: mol_type = other DNA
aaggcaaaaatgtca

SEQ ID NO: 19855 - DNA, 15 bp, synthetic construct
  source 1..15: mol_type = other DNA
aagagtccgttgaaa

SEQ ID NO: 19856 - DNA, 15 bp, synthetic construct
  source 1..15: mol_type = other DNA
cagttgtcttttgcg

SEQ ID NO: 19857 - DNA, 15 bp, synthetic construct
  source 1..15: mol_type = other DNA
actggagaaacgaag

SEQ ID NO: 19858 - DNA, 15 bp, synthetic construct
  source 1..15: mol_type = other DNA
tcgcacactaactcc

SEQ ID NO: 19859 - DNA, 15 bp, synthetic construct
  source 1..15: mol_type = other DNA
gtgtattccctttat

SEQ ID NO: 19860 - DNA, 15 bp, synthetic construct
  source 1..15: mol_type = other DNA
tcttgccttcgattc

SEQ ID NO: 19861 - DNA, 15 bp, synthetic construct
  source 1..15: mol_type = other DNA
ggcaacgacaacttg

SEQ ID NO: 19862 - DNA, 15 bp, synthetic construct
  source 1..15: mol_type = other DNA
gttgatgctttttat

SEQ ID NO: 19863 - DNA, 15 bp, synthetic construct
  source 1..15: mol_type = other DNA
ggcaacgacaacttg

SEQ ID NO: 19864 - DNA, 15 bp, synthetic construct
  source 1..15: mol_type = other DNA
ggcaacgacaacttg

SEQ ID NO: 19865 - DNA, 15 bp, synthetic construct
  source 1..15: mol_type = other DNA
ggttatactttgaaa

SEQ ID NO: 19866 - DNA, 15 bp, synthetic construct
  source 1..15: mol_type = other DNA
agcttttaagaggca

SEQ ID NO: 19867 - DNA, 15 bp, synthetic construct
  source 1..15: mol_type = other DNA
cagcttcaccatgca

SEQ ID NO: 19868 - DNA, 15 bp, synthetic construct
  source 1..15: mol_type = other DNA
aaaataaaacaccta

SEQ ID NO: 19869 - DNA, 15 bp, synthetic construct
  source 1..15: mol_type = other DNA
caaattaaagttttt

SEQ ID NO: 19870 - DNA, 15 bp, synthetic construct
  source 1..15: mol_type = other DNA
ttggacagttaaaaa

SEQ ID NO: 19871 - DNA, 15 bp, synthetic construct
  source 1..15: mol_type = other DNA
taaatagttgatgta

SEQ ID NO: 19872 - DNA, 15 bp, synthetic construct
  source 1..15: mol_type = other DNA
agaatagtaaatcct

SEQ ID NO: 19873 - DNA, 15 bp, synthetic construct
  source 1..15: mol_type = other DNA
tgatgttcccatccc

SEQ ID NO: 19874 - DNA, 15 bp, synthetic construct
  source 1..15: mol_type = other DNA
ctcctcccttttcag

SEQ ID NO: 19875 - DNA, 15 bp, synthetic construct
  source 1..15: mol_type = other DNA
accaagaaaactcca

SEQ ID NO: 19876 - DNA, 15 bp, synthetic construct
  source 1..15: mol_type = other DNA
gagaagatgacttat

SEQ ID NO: 19877 - DNA, 15 bp, synthetic construct
  source 1..15: mol_type = other DNA
gttagttgtttggct

SEQ ID NO: 19878 - DNA, 15 bp, synthetic construct
  source 1..15: mol_type = other DNA
aggctaatcttcaac

SEQ ID NO: 19879 - DNA, 15 bp, synthetic construct
  source 1..15: mol_type = other DNA
ggctagttaaccacc

SEQ ID NO: 19880 - DNA, 15 bp, synthetic construct
  source 1..15: mol_type = other DNA
acacatttttactgc

SEQ ID NO: 19881 - DNA, 15 bp, synthetic construct
  source 1..15: mol_type = other DNA
cctatgccatatgtc

SEQ ID NO: 19882 - DNA, 15 bp, synthetic construct
  source 1..15: mol_type = other DNA
gtcactggtttcact

SEQ ID NO: 19883 - DNA, 15 bp, synthetic construct
  source 1..15: mol_type = other DNA
cccagaaaatgaggt

SEQ ID NO: 19884 - DNA, 15 bp, synthetic construct
  source 1..15: mol_type = other DNA
acaatccaagactat

SEQ ID NO: 19885 - DNA, 15 bp, synthetic construct
  source 1..15: mol_type = other DNA
tagggagtgcttgtt

SEQ ID NO: 19886 - DNA, 15 bp, synthetic construct
  source 1..15: mol_type = other DNA
tagatagcatgctaa

SEQ ID NO: 19887 - DNA, 15 bp, synthetic construct
  source 1..15: mol_type = other DNA
gccctaattgataac

SEQ ID NO: 19888 - DNA, 15 bp, synthetic construct
  source 1..15: mol_type = other DNA
ccaaaccaccacatg

SEQ ID NO: 19889 - DNA, 15 bp, synthetic construct
  source 1..15: mol_type = other DNA
tcatcaccgtcctgg

SEQ ID NO: 19890 - DNA, 15 bp, synthetic construct
  source 1..15: mol_type = other DNA
gtaatataacgccta

SEQ ID NO: 19891 - DNA, 15 bp, synthetic construct
  source 1..15: mol_type = other DNA
ctgtgggtcgtttaa

SEQ ID NO: 19892 - DNA, 15 bp, synthetic construct
  source 1..15: mol_type = other DNA
ttacacaatgtcctt

SEQ ID NO: 19893 - DNA, 15 bp, synthetic construct
  source 1..15: mol_type = other DNA
tactgaacttttatg

SEQ ID NO: 19894 - DNA, 15 bp, synthetic construct
  source 1..15: mol_type = other DNA
tgctcagaactctcg

SEQ ID NO: 19895 - DNA, 15 bp, synthetic construct
  source 1..15: mol_type = other DNA
cagaatttattgcca

SEQ ID NO: 19896 - DNA, 15 bp, synthetic construct
  source 1..15: mol_type = other DNA
gtgactccccacaaa

SEQ ID NO: 19897 - DNA, 15 bp, synthetic construct
  source 1..15: mol_type = other DNA
cgggtttgtatcatc

SEQ ID NO: 19898 - DNA, 15 bp, synthetic construct
  source 1..15: mol_type = other DNA
gcttctggccctaat

SEQ ID NO: 19899 - DNA, 15 bp, synthetic construct
  source 1..15: mol_type = other DNA
tgctgactcttaaca

SEQ ID NO: 19900 - DNA, 15 bp, synthetic construct
  source 1..15: mol_type = other DNA
ttttgtgtattgaaa

SEQ ID NO: 19901 - DNA, 15 bp, synthetic construct
  source 1..15: mol_type = other DNA
aaagtgagctgtatt

SEQ ID NO: 19902 - DNA, 15 bp, synthetic construct
  source 1..15: mol_type = other DNA
ggaaaaactcaagtg

SEQ ID NO: 19903 - DNA, 15 bp, synthetic construct
  source 1..15: mol_type = other DNA
acagttccacctact

SEQ ID NO: 19904 - DNA, 15 bp, synthetic construct
  source 1..15: mol_type = other DNA
tttccaccagtcagg

SEQ ID NO: 19905 - DNA, 15 bp, synthetic construct
  source 1..15: mol_type = other DNA
ccagatcatcaacgt

SEQ ID NO: 19906 - DNA, 15 bp, synthetic construct
  source 1..15: mol_type = other DNA
aagataccagagagg

SEQ ID NO: 19907 - DNA, 15 bp, synthetic construct
  source 1..15: mol_type = other DNA
ttggcaccatgctgt

SEQ ID NO: 19908 - DNA, 15 bp, synthetic construct
  source 1..15: mol_type = other DNA
aggcagtaggtgatc

SEQ ID NO: 19909 - DNA, 15 bp, synthetic construct
  source 1..15: mol_type = other DNA
cgtgtgaagttgtgt

SEQ ID NO: 19910 - DNA, 15 bp, synthetic construct
  source 1..15: mol_type = other DNA
tccttgacggaaccc

SEQ ID NO: 19911 - DNA, 15 bp, synthetic construct
  source 1..15: mol_type = other DNA
ttaagctaactgctt

SEQ ID NO: 19912 - DNA, 15 bp, synthetic construct
  source 1..15: mol_type = other DNA
ctttagtagtttgat

SEQ ID NO: 19913 - DNA, 15 bp, synthetic construct
  source 1..15: mol_type = other DNA
actggaaggagctga

SEQ ID NO: 19914 - DNA, 15 bp, synthetic construct
  source 1..15: mol_type = other DNA
caatgagaagaaaaa

SEQ ID NO: 19915 - DNA, 15 bp, synthetic construct
  source 1..15: mol_type = other DNA
aaaatgctctggtgc

SEQ ID NO: 19916 - DNA, 15 bp, synthetic construct
  source 1..15: mol_type = other DNA
atcttcacaggcatc

SEQ ID NO: 19917 - DNA, 15 bp, synthetic construct
  source 1..15: mol_type = other DNA
tccgcaagaagatgt

SEQ ID NO: 19918 - DNA, 15 bp, synthetic construct
  source 1..15: mol_type = other DNA
gcccctcacacatcc

SEQ ID NO: 19919 - DNA, 15 bp, synthetic construct
  source 1..15: mol_type = other DNA
cactgacattagtat

SEQ ID NO: 19920 - DNA, 15 bp, synthetic construct
  source 1..15: mol_type = other DNA
aatcttgtccatgac

SEQ ID NO: 19921 - DNA, 15 bp, synthetic construct
  source 1..15: mol_type = other DNA
cgtgattgccatgtg

SEQ ID NO: 19922 - DNA, 15 bp, synthetic construct
  source 1..15: mol_type = other DNA
gggaacagagctctt

SEQ ID NO: 19923 - DNA, 15 bp, synthetic construct
  source 1..15: mol_type = other DNA
aacacccctgaaaac

SEQ ID NO: 19924 - DNA, 15 bp, synthetic construct
  source 1..15: mol_type = other DNA
gcttttctttgtcct

SEQ ID NO: 19925 - DNA, 15 bp, synthetic construct
  source 1..15: mol_type = other DNA
cttttgcctgagatc

SEQ ID NO: 19926 - DNA, 15 bp, synthetic construct
  source 1..15: mol_type = other DNA
ttcgtgatctgagtc

SEQ ID NO: 19927 - DNA, 15 bp, synthetic construct
  source 1..15: mol_type = other DNA
cttccttttcaacga

SEQ ID NO: 19928 - DNA, 15 bp, synthetic construct
  source 1..15: mol_type = other DNA
taatgcaaaatctag

SEQ ID NO: 19929 - DNA, 15 bp, synthetic construct
  source 1..15: mol_type = other DNA
ttagtctggtttact

SEQ ID NO: 19930 - DNA, 15 bp, synthetic construct
  source 1..15: mol_type = other DNA
ttagtctggtttact

SEQ ID NO: 19931 - DNA, 15 bp, synthetic construct
  source 1..15: mol_type = other DNA
ctttccagcctattt

SEQ ID NO: 19932 - DNA, 15 bp, synthetic construct
  source 1..15: mol_type = other DNA
acctgattaatcacc

SEQ ID NO: 19933 - DNA, 15 bp, synthetic construct
  source 1..15: mol_type = other DNA
tttcttatcgatggc

SEQ ID NO: 19934 - DNA, 15 bp, synthetic construct
  source 1..15: mol_type = other DNA
tctcgcgcttctttt

SEQ ID NO: 19935 - DNA, 15 bp, synthetic construct
  source 1..15: mol_type = other DNA
tctgaactctacata

SEQ ID NO: 19936 - DNA, 15 bp, synthetic construct
  source 1..15: mol_type = other DNA
acacttgcttccttg

SEQ ID NO: 19937 - DNA, 15 bp, synthetic construct
  source 1..15: mol_type = other DNA
aatgcattgtgaggc

SEQ ID NO: 19938 - DNA, 15 bp, synthetic construct
  source 1..15: mol_type = other DNA
gatctagagccaggt

SEQ ID NO: 19939 - DNA, 15 bp, synthetic construct
  source 1..15: mol_type = other DNA
atcaaaatgaggtgt

SEQ ID NO: 19940 - DNA, 15 bp, synthetic construct
  source 1..15: mol_type = other DNA
gatgcagaggacttc

SEQ ID NO: 19941 - DNA, 15 bp, synthetic construct
  source 1..15: mol_type = other DNA
tgccagttcttcatc

SEQ ID NO: 19942 - DNA, 15 bp, synthetic construct
  source 1..15: mol_type = other DNA
taacccacgcaaacg

SEQ ID NO: 19943 - DNA, 15 bp, synthetic construct
  source 1..15: mol_type = other DNA
catgacacattggca

SEQ ID NO: 19944 - DNA, 15 bp, synthetic construct
  source 1..15: mol_type = other DNA
gtaactggacctttg

SEQ ID NO: 19945 - DNA, 15 bp, synthetic construct
  source 1..15: mol_type = other DNA
gtcggacggagatcc

SEQ ID NO: 19946 - DNA, 15 bp, synthetic construct
  source 1..15: mol_type = other DNA
cagacagcatgtgtg

SEQ ID NO: 19947 - DNA, 15 bp, synthetic construct
  source 1..15: mol_type = other DNA
tcacccagcggatgg

SEQ ID NO: 19948 - DNA, 15 bp, synthetic construct
  source 1..15: mol_type = other DNA
ggttttcagtgaacg

SEQ ID NO: 19949 - DNA, 15 bp, synthetic construct
  source 1..15: mol_type = other DNA
cgaggtgtgcgagag

SEQ ID NO: 19950 - DNA, 15 bp, synthetic construct
  source 1..15: mol_type = other DNA
gacagcacatagtcc

SEQ ID NO: 19951 - DNA, 15 bp, synthetic construct
  source 1..15: mol_type = other DNA
ctcgtccgcgattct

SEQ ID NO: 19952 - DNA, 15 bp, synthetic construct
  source 1..15: mol_type = other DNA
actcttcgacagacc

SEQ ID NO: 19953 - DNA, 15 bp, synthetic construct
  source 1..15: mol_type = other DNA
gtttgacaggcactg

SEQ ID NO: 19954 - DNA, 15 bp, synthetic construct
  source 1..15: mol_type = other DNA
caggcttctctatta

SEQ ID NO: 19955 - DNA, 15 bp, synthetic construct
  source 1..15: mol_type = other DNA
ggaatatgtacggac

SEQ ID NO: 19956 - DNA, 15 bp, synthetic construct
  source 1..15: mol_type = other DNA
aggttgagcgtatgc

SEQ ID NO: 19957 - DNA, 15 bp, synthetic construct
  source 1..15: mol_type = other DNA
atggaaataggaatt

SEQ ID NO: 19958 - DNA, 15 bp, synthetic construct
  source 1..15: mol_type = other DNA
caaaggacccaaaaa

SEQ ID NO: 19959 - DNA, 15 bp, synthetic construct
  source 1..15: mol_type = other DNA
ttcttgttgcagaga

SEQ ID NO: 19960 - DNA, 15 bp, synthetic construct
  source 1..15: mol_type = other DNA
tgctttcccacttca

SEQ ID NO: 19961 - DNA, 15 bp, synthetic construct
  source 1..15: mol_type = other DNA
accaggaggccgtat

SEQ ID NO: 19962 - DNA, 15 bp, synthetic construct
  source 1..15: mol_type = other DNA
accacgaagtagata

SEQ ID NO: 19963 - DNA, 15 bp, synthetic construct
  source 1..15: mol_type = other DNA
gcagccgatatctcc

SEQ ID NO: 19964 - DNA, 15 bp, synthetic construct
  source 1..15: mol_type = other DNA
cttctaaagtgcttc

SEQ ID NO: 19965 - DNA, 15 bp, synthetic construct
  source 1..15: mol_type = other DNA
ggtgcacgaatgggg

SEQ ID NO: 19966 - DNA, 15 bp, synthetic construct
  source 1..15: mol_type = other DNA
ctagaatcaccacca

SEQ ID NO: 19967 - DNA, 15 bp, synthetic construct
  source 1..15: mol_type = other DNA
actttcttttgcgtt

SEQ ID NO: 19968 - DNA, 15 bp, synthetic construct
  source 1..15: mol_type = other DNA
gttccctaacatctt

SEQ ID NO: 19969 - DNA, 15 bp, synthetic construct
  source 1..15: mol_type = other DNA
tgggtaatttttctg

SEQ ID NO: 19970 - DNA, 15 bp, synthetic construct
  source 1..15: mol_type = other DNA
tcccataatgtctcc

SEQ ID NO: 19971 - DNA, 15 bp, synthetic construct
  source 1..15: mol_type = other DNA
cagcaaaagttatga

SEQ ID NO: 19972 - DNA, 15 bp, synthetic construct
  source 1..15: mol_type = other DNA
ctcaccgagatcttg

SEQ ID NO: 19973 - DNA, 15 bp, synthetic construct
  source 1..15: mol_type = other DNA
ccagagtacctgagg

SEQ ID NO: 19974 - DNA, 15 bp, synthetic construct
  source 1..15: mol_type = other DNA
cattggctcctcgat

SEQ ID NO: 19975 - DNA, 15 bp, synthetic construct
  source 1..15: mol_type = other DNA
atcaggagtagagag

SEQ ID NO: 19976 - DNA, 15 bp, synthetic construct
  source 1..15: mol_type = other DNA
ccctttatccttcac

SEQ ID NO: 19977 - DNA, 15 bp, synthetic construct
  source 1..15: mol_type = other DNA
gctgaatagcaaaat

SEQ ID NO: 19978 - DNA, 15 bp, synthetic construct
  source 1..15: mol_type = other DNA
cccagtcaggattaa

SEQ ID NO: 19979 - DNA, 15 bp, synthetic construct
  source 1..15: mol_type = other DNA
ggacaccttgcagac

SEQ ID NO: 19980 - DNA, 15 bp, synthetic construct
  source 1..15: mol_type = other DNA
cttccagggataagg

SEQ ID NO: 19981 - DNA, 15 bp, synthetic construct
  source 1..15: mol_type = other DNA
ctatggaaagaagct

SEQ ID NO: 19982 - DNA, 15 bp, synthetic construct
  source 1..15: mol_type = other DNA
acatcccaaagatga

SEQ ID NO: 19983 - DNA, 15 bp, synthetic construct
  source 1..15: mol_type = other DNA
tggaaaagtacatga

SEQ ID NO: 19984 - DNA, 15 bp, synthetic construct
  source 1..15: mol_type = other DNA
caggagttcctgtag

SEQ ID NO: 19985 - DNA, 15 bp, synthetic construct
  source 1..15: mol_type = other DNA
agtacaaaggtgtca

SEQ ID NO: 19986 - DNA, 15 bp, synthetic construct
  source 1..15: mol_type = other DNA
gacttggagacagaa

SEQ ID NO: 19987 - DNA, 15 bp, synthetic construct
  source 1..15: mol_type = other DNA
caatgtctgcttgct

SEQ ID NO: 19988 - DNA, 15 bp, synthetic construct
  source 1..15: mol_type = other DNA
acaggaatgtaggtg

SEQ ID NO: 19989 - DNA, 15 bp, synthetic construct
  source 1..15: mol_type = other DNA
gccactcaaaaatcc

SEQ ID NO: 19990 - DNA, 15 bp, synthetic construct
  source 1..15: mol_type = other DNA
ggaacctctctgatc

SEQ ID NO: 19991 - DNA, 15 bp, synthetic construct
  source 1..15: mol_type = other DNA
acaccttgttgtggg

SEQ ID NO: 19992 - DNA, 15 bp, synthetic construct
  source 1..15: mol_type = other DNA
acatggaaacttcta

SEQ ID NO: 19993 - DNA, 15 bp, synthetic construct
  source 1..15: mol_type = other DNA
ctgggttcagacagc

SEQ ID NO: 19994 - DNA, 15 bp, synthetic construct
  source 1..15: mol_type = other DNA
ccccacagataatcg

SEQ ID NO: 19995 - DNA, 15 bp, synthetic construct
  source 1..15: mol_type = other DNA
gggttttctttcaca

SEQ ID NO: 19996 - DNA, 15 bp, synthetic construct
  source 1..15: mol_type = other DNA
agatcccctaaatgg

SEQ ID NO: 19997 - DNA, 15 bp, synthetic construct
  source 1..15: mol_type = other DNA
ttgatgcatatctct

SEQ ID NO: 19998 - DNA, 15 bp, synthetic construct
  source 1..15: mol_type = other DNA
cttgttgttgtagga

SEQ ID NO: 19999 - DNA, 15 bp, synthetic construct
  source 1..15: mol_type = other DNA
aattcttctatgcct

SEQ ID NO: 20000 - DNA, 15 bp, synthetic construct
  source 1..15: mol_type = other DNA
gactcaggcaaaata

SEQ ID NO: 20001 - DNA, 15 bp, synthetic construct
  source 1..15: mol_type = other DNA
aagttcctgagaaga

SEQ ID NO: 20002 - DNA, 15 bp, synthetic construct
  source 1..15: mol_type = other DNA
agtccagccatggta

SEQ ID NO: 20003 - DNA, 15 bp, synthetic construct
  source 1..15: mol_type = other DNA
cctaatgggaaacgt

SEQ ID NO: 20004 - DNA, 15 bp, synthetic construct
  source 1..15: mol_type = other DNA
ccaggtttgattctc

SEQ ID NO: 20005 - DNA, 15 bp, synthetic construct
  source 1..15: mol_type = other DNA
cttgtagcgagccta

SEQ ID NO: 20006 - DNA, 15 bp, synthetic construct
  source 1..15: mol_type = other DNA
cagtccaattgtgca

SEQ ID NO: 20007 - DNA, 15 bp, synthetic construct
  source 1..15: mol_type = other DNA
gctagttatcacaca

SEQ ID NO: 20008 - DNA, 15 bp, synthetic construct
  source 1..15: mol_type = other DNA
accagattgtttgtc

SEQ ID NO: 20009 - DNA, 15 bp, synthetic construct
  source 1..15: mol_type = other DNA
aggttggtcttggtg

SEQ ID NO: 20010 - DNA, 15 bp, synthetic construct
  source 1..15: mol_type = other DNA
gagtaggaaccagca

SEQ ID NO: 20011 - DNA, 15 bp, synthetic construct
  source 1..15: mol_type = other DNA
tctatagcactaatg

SEQ ID NO: 20012 - DNA, 15 bp, synthetic construct
  source 1..15: mol_type = other DNA
cctcattatcagtca

SEQ ID NO: 20013 - DNA, 15 bp, synthetic construct
  source 1..15: mol_type = other DNA
aagtatttcaaggaa

SEQ ID NO: 20014 - DNA, 15 bp, synthetic construct
  source 1..15: mol_type = other DNA
cttcctggagtgcca

SEQ ID NO: 20015 - DNA, 15 bp, synthetic construct
  source 1..15: mol_type = other DNA
atttcttaatccttt

SEQ ID NO: 20016 - DNA, 15 bp, synthetic construct
  source 1..15: mol_type = other DNA
agccttcttatgtta

SEQ ID NO: 20017 - DNA, 15 bp, synthetic construct
  source 1..15: mol_type = other DNA
ctcggttgaaaagtg

SEQ ID NO: 20018 - DNA, 15 bp, synthetic construct
  source 1..15: mol_type = other DNA
tggtaatcccggtca

SEQ ID NO: 20019 - DNA, 15 bp, synthetic construct
  source 1..15: mol_type = other DNA
tggaacctgggatgg

SEQ ID NO: 20020 - DNA, 15 bp, synthetic construct
  source 1..15: mol_type = other DNA
gaagattggctctgg

SEQ ID NO: 20021 - DNA, 15 bp, synthetic construct
  source 1..15: mol_type = other DNA
caatacttaccaact

SEQ ID NO: 20022 - DNA, 15 bp, synthetic construct
  source 1..15: mol_type = other DNA
attcgtacacgaggt

SEQ ID NO: 20023 - DNA, 15 bp, synthetic construct
  source 1..15: mol_type = other DNA
gagtcaagctcacgg

SEQ ID NO: 20024 - DNA, 15 bp, synthetic construct
  source 1..15: mol_type = other DNA
caggcatatctctcc

SEQ ID NO: 20025 - DNA, 15 bp, synthetic construct
  source 1..15: mol_type = other DNA
tccatccatctcagg

SEQ ID NO: 20026 - DNA, 15 bp, synthetic construct
  source 1..15: mol_type = other DNA
tctcgaattcacttt

SEQ ID NO: 20027 - DNA, 15 bp, synthetic construct
  source 1..15: mol_type = other DNA
gttgaggaacaagct

SEQ ID NO: 20028 - DNA, 15 bp, synthetic construct
  source 1..15: mol_type = other DNA
tccgcaggccgacaa

SEQ ID NO: 20029 - DNA, 15 bp, synthetic construct
  source 1..15: mol_type = other DNA
caggcgggtagatgc

SEQ ID NO: 20030 - DNA, 15 bp, synthetic construct
  source 1..15: mol_type = other DNA
gaagctgaaggatgt

SEQ ID NO: 20031 - DNA, 15 bp, synthetic construct
  source 1..15: mol_type = other DNA
caggcgggtagatgc

SEQ ID NO: 20032 - DNA, 15 bp, synthetic construct
  source 1..15: mol_type = other DNA
gaagctgaaggatgt

SEQ ID NO: 20033 - DNA, 15 bp, synthetic construct
  source 1..15: mol_type = other DNA
tactgctcggcgttc

SEQ ID NO: 20034 - DNA, 15 bp, synthetic construct
  source 1..15: mol_type = other DNA
ccgggtacacatagg

SEQ ID NO: 20035 - DNA, 15 bp, synthetic construct
  source 1..15: mol_type = other DNA
ttcaaaccccacaag

SEQ ID NO: 20036 - DNA, 15 bp, synthetic construct
  source 1..15: mol_type = other DNA
agtacaaggcctcca

SEQ ID NO: 20037 - DNA, 15 bp, synthetic construct
  source 1..15: mol_type = other DNA
cgtacttggtctcgt

SEQ ID NO: 20038 - DNA, 15 bp, synthetic construct
  source 1..15: mol_type = other DNA
ctgcagatcgaccag

SEQ ID NO: 20039 - DNA, 15 bp, synthetic construct
  source 1..15: mol_type = other DNA
gctccttgttctggc

SEQ ID NO: 20040 - DNA, 15 bp, synthetic construct
  source 1..15: mol_type = other DNA
agaagtttctaatct

SEQ ID NO: 20041 - DNA, 15 bp, synthetic construct
  source 1..15: mol_type = other DNA
cattttcccctaagc

SEQ ID NO: 20042 - DNA, 15 bp, synthetic construct
  source 1..15: mol_type = other DNA
gttagaggagaagcg

SEQ ID NO: 20043 - DNA, 15 bp, synthetic construct
  source 1..15: mol_type = other DNA
agctgggcgatgcgg

SEQ ID NO: 20044 - DNA, 15 bp, synthetic construct
  source 1..15: mol_type = other DNA
tggctgcctttaggt

SEQ ID NO: 20045 - DNA, 15 bp, synthetic construct
  source 1..15: mol_type = other DNA
agctgggcgatgcgg

SEQ ID NO: 20046 - DNA, 15 bp, synthetic construct
  source 1..15: mol_type = other DNA
tggctgcctttaggt

SEQ ID NO: 20047 - DNA, 15 bp, synthetic construct
  source 1..15: mol_type = other DNA
gatcatacgagggag

SEQ ID NO: 20048 - DNA, 15 bp, synthetic construct
  source 1..15: mol_type = other DNA
aagctgaagagcatg

SEQ ID NO: 20049 - DNA, 15 bp, synthetic construct
  source 1..15: mol_type = other DNA
gcaactggatcatct

SEQ ID NO: 20050 - DNA, 15 bp, synthetic construct
  source 1..15: mol_type = other DNA
cggttagttggttaa

SEQ ID NO: 20051 - DNA, 15 bp, synthetic construct
  source 1..15: mol_type = other DNA
tcatatgtagttggc

SEQ ID NO: 20052 - DNA, 15 bp, synthetic construct
  source 1..15: mol_type = other DNA
aagttgttgatgttc

SEQ ID NO: 20053 - DNA, 15 bp, synthetic construct
  source 1..15: mol_type = other DNA
taagaactctaagaa

SEQ ID NO: 20054 - DNA, 15 bp, synthetic construct
  source 1..15: mol_type = other DNA
tgaaggcccagttcg

SEQ ID NO: 20055 - DNA, 15 bp, synthetic construct
  source 1..15: mol_type = other DNA
gctgcttcttcttct

SEQ ID NO: 20056 - DNA, 15 bp, synthetic construct
  source 1..15: mol_type = other DNA
tttgctcctgacttg

SEQ ID NO: 20057 - DNA, 15 bp, synthetic construct
  source 1..15: mol_type = other DNA
gatgaccccactcgg

SEQ ID NO: 20058 - DNA, 15 bp, synthetic construct
  source 1..15: mol_type = other DNA
catctctgccaagta

SEQ ID NO: 20059 - DNA, 15 bp, synthetic construct
  source 1..15: mol_type = other DNA
ctcataaggtcctcc

SEQ ID NO: 20060 - DNA, 15 bp, synthetic construct
  source 1..15: mol_type = other DNA
ctgagcctcatggtg

SEQ ID NO: 20061 - DNA, 15 bp, synthetic construct
  source 1..15: mol_type = other DNA
ggactcagtgcttga

SEQ ID NO: 20062 - DNA, 15 bp, synthetic construct
  source 1..15: mol_type = other DNA
gaagctccagaagga

SEQ ID NO: 20063 - DNA, 15 bp, synthetic construct
  source 1..15: mol_type = other DNA
tccagcttgtcgtag

SEQ ID NO: 20064 - DNA, 15 bp, synthetic construct
  source 1..15: mol_type = other DNA
ggcatctgcttactc

SEQ ID NO: 20065 - DNA, 15 bp, synthetic construct
  source 1..15: mol_type = other DNA
ccttgagagcactga

SEQ ID NO: 20066 - DNA, 15 bp, synthetic construct
  source 1..15: mol_type = other DNA
acgagaagaattcct

SEQ ID NO: 20067 - DNA, 15 bp, synthetic construct
  source 1..15: mol_type = other DNA
ttctccaggttgtgc

SEQ ID NO: 20068 - DNA, 15 bp, synthetic construct
  source 1..15: mol_type = other DNA
ctccaggtctttacg

SEQ ID NO: 20069 - DNA, 15 bp, synthetic construct
  source 1..15: mol_type = other DNA
taatgttgcgtggac

SEQ ID NO: 20070 - DNA, 15 bp, synthetic construct
  source 1..15: mol_type = other DNA
ccagctttacctaaa

SEQ ID NO: 20071 - DNA, 15 bp, synthetic construct
  source 1..15: mol_type = other DNA
cctttaggtaaagct

SEQ ID NO: 20072 - DNA, 15 bp, synthetic construct
  source 1..15: mol_type = other DNA
aggtcaagttcaacg

SEQ ID NO: 20073 - DNA, 15 bp, synthetic construct
  source 1..15: mol_type = other DNA
tggtgaccttgtcgg

SEQ ID NO: 20074 - DNA, 15 bp, synthetic construct
  source 1..15: mol_type = other DNA
cacgtctttgctttc

SEQ ID NO: 20075 - DNA, 15 bp, synthetic construct
  source 1..15: mol_type = other DNA
tagaaccctgcaact

SEQ ID NO: 20076 - DNA, 15 bp, synthetic construct
  source 1..15: mol_type = other DNA
gtccaggtcaaaacg

SEQ ID NO: 20077 - DNA, 15 bp, synthetic construct
  source 1..15: mol_type = other DNA
ttcttcaggatgttc

SEQ ID NO: 20078 - DNA, 15 bp, synthetic construct
  source 1..15: mol_type = other DNA
gctgaaaggctacag

SEQ ID NO: 20079 - DNA, 15 bp, synthetic construct
  source 1..15: mol_type = other DNA
atcccgagggacttg

SEQ ID NO: 20080 - DNA, 15 bp, synthetic construct
  source 1..15: mol_type = other DNA
atgttgctggtcgct

SEQ ID NO: 20081 - DNA, 15 bp, synthetic construct
  source 1..15: mol_type = other DNA
taagacaacagtgga

SEQ ID NO: 20082 - DNA, 15 bp, synthetic construct
  source 1..15: mol_type = other DNA
cacagacctcagcga

SEQ ID NO: 20083 - DNA, 15 bp, synthetic construct
  source 1..15: mol_type = other DNA
ttgagctccgcgatc

SEQ ID NO: 20084 - DNA, 15 bp, synthetic construct
  source 1..15: mol_type = other DNA
ttgggtgcgagtgtc

SEQ ID NO: 20085 - DNA, 15 bp, synthetic construct
  source 1..15: mol_type = other DNA
ctcaggtctaaaggg

SEQ ID NO: 20086 - DNA, 15 bp, synthetic construct
  source 1..15: mol_type = other DNA
atagctgagttcacc

SEQ ID NO: 20087 - DNA, 15 bp, synthetic construct
  source 1..15: mol_type = other DNA
gatcattgcctcatg

SEQ ID NO: 20088 - DNA, 15 bp, synthetic construct
  source 1..15: mol_type = other DNA
tgaacttgatcaagc

SEQ ID NO: 20089 - DNA, 15 bp, synthetic construct
  source 1..15: mol_type = other DNA
cacactctcccatcc

SEQ ID NO: 20090 - DNA, 15 bp, synthetic construct
  source 1..15: mol_type = other DNA
tgtccttaccgtgtc

SEQ ID NO: 20091 - DNA, 15 bp, synthetic construct
  source 1..15: mol_type = other DNA
ctaattccatgttct

SEQ ID NO: 20092 - DNA, 15 bp, synthetic construct
  source 1..15: mol_type = other DNA
gaattagaagagatc

SEQ ID NO: 20093 - DNA, 15 bp, synthetic construct
  source 1..15: mol_type = other DNA
gctgcatcttcttct

SEQ ID NO: 20094 - DNA, 15 bp, synthetic construct
  source 1..15: mol_type = other DNA
tgttttccacttgtt

SEQ ID NO: 20095 - DNA, 15 bp, synthetic construct
  source 1..15: mol_type = other DNA
aaacttccagcatgc

SEQ ID NO: 20096 - DNA, 15 bp, synthetic construct
  source 1..15: mol_type = other DNA
ctacctctatctcct

SEQ ID NO: 20097 - DNA, 15 bp, synthetic construct
  source 1..15: mol_type = other DNA
caggtatgtatggtg

SEQ ID NO: 20098 - DNA, 15 bp, synthetic construct
  source 1..15: mol_type = other DNA
tgttaggtcgggtct

SEQ ID NO: 20099 - DNA, 15 bp, synthetic construct
  source 1..15: mol_type = other DNA
cctttggcaacagaa

SEQ ID NO: 20100 - DNA, 15 bp, synthetic construct
  source 1..15: mol_type = other DNA
ctggccaggtaaacg

SEQ ID NO: 20101 - DNA, 15 bp, synthetic construct
  source 1..15: mol_type = other DNA
actgatatagcaagg

SEQ ID NO: 20102 - DNA, 15 bp, synthetic construct
  source 1..15: mol_type = other DNA
attgtagaaatgatg

SEQ ID NO: 20103 - DNA, 15 bp, synthetic construct
  source 1..15: mol_type = other DNA
acatggatggaggac

SEQ ID NO: 20104 - DNA, 15 bp, synthetic construct
  source 1..15: mol_type = other DNA
cgagggcatccgtat

SEQ ID NO: 20105 - DNA, 15 bp, synthetic construct
  source 1..15: mol_type = other DNA
tggaagaccaccctg

SEQ ID NO: 20106 - DNA, 15 bp, synthetic construct
  source 1..15: mol_type = other DNA
tttgacttcattgtc

SEQ ID NO: 20107 - DNA, 15 bp, synthetic construct
  source 1..15: mol_type = other DNA
cgactgaaggctctg

SEQ ID NO: 20108 - DNA, 15 bp, synthetic construct
  source 1..15: mol_type = other DNA
tgatggctacgctga

SEQ ID NO: 20109 - DNA, 15 bp, synthetic construct
  source 1..15: mol_type = other DNA
cagcggacaaagttg

SEQ ID NO: 20110 - DNA, 15 bp, synthetic construct
  source 1..15: mol_type = other DNA
ctgtccgacgtgtgc

SEQ ID NO: 20111 - DNA, 15 bp, synthetic construct
  source 1..15: mol_type = other DNA
atgggagctacagag

SEQ ID NO: 20112 - DNA, 15 bp, synthetic construct
  source 1..15: mol_type = other DNA
ttacaaagctgacga

SEQ ID NO: 20113 - DNA, 15 bp, synthetic construct
  source 1..15: mol_type = other DNA
cttgtcagaggactg

SEQ ID NO: 20114 - DNA, 15 bp, synthetic construct
  source 1..15: mol_type = other DNA
ccacttccttcttag

SEQ ID NO: 20115 - DNA, 15 bp, synthetic construct
  source 1..15: mol_type = other DNA
agcctcgactccacc

SEQ ID NO: 20116 - DNA, 15 bp, synthetic construct
  source 1..15: mol_type = other DNA
ctcacctgtgctgat

SEQ ID NO: 20117 - DNA, 15 bp, synthetic construct
  source 1..15: mol_type = other DNA
gacacctccacaacc

SEQ ID NO: 20118 - DNA, 15 bp, synthetic construct
  source 1..15: mol_type = other DNA
agctgtgcatcaatt

SEQ ID NO: 20119 - DNA, 15 bp, synthetic construct
  source 1..15: mol_type = other DNA
tcaatgaggtcgatg

SEQ ID NO: 20120 - DNA, 15 bp, synthetic construct
  source 1..15: mol_type = other DNA
tctctgacattgttt

SEQ ID NO: 20121 - DNA, 15 bp, synthetic construct
  source 1..15: mol_type = other DNA
tgcaaaggagatggc

SEQ ID NO: 20122 - DNA, 15 bp, synthetic construct
  source 1..15: mol_type = other DNA
tatgagcggatgttc

SEQ ID NO: 20123 - DNA, 15 bp, synthetic construct
  source 1..15: mol_type = other DNA
tcaaagatctcgaag

SEQ ID NO: 20124 - DNA, 15 bp, synthetic construct
  source 1..15: mol_type = other DNA
aagtgaaattactgg

SEQ ID NO: 20125 - DNA, 15 bp, synthetic construct
  source 1..15: mol_type = other DNA
tcatggaatcatgtg

SEQ ID NO: 20126 - DNA, 15 bp, synthetic construct
  source 1..15: mol_type = other DNA
atcttagctgcccaa

SEQ ID NO: 20127 - DNA, 15 bp, synthetic construct
  source 1..15: mol_type = other DNA
ctgctctttagtctg

SEQ ID NO: 20128 - DNA, 15 bp, synthetic construct
  source 1..15: mol_type = other DNA
gggacttattctctt

SEQ ID NO: 20129 - DNA, 15 bp, synthetic construct
  source 1..15: mol_type = other DNA
cggaatttccgcaag

SEQ ID NO: 20130 - DNA, 15 bp, synthetic construct
  source 1..15: mol_type = other DNA
catgacccatgtctg

SEQ ID NO: 20131 - DNA, 15 bp, synthetic construct
  source 1..15: mol_type = other DNA
cacactcgaccatag

SEQ ID NO: 20132 - DNA, 15 bp, synthetic construct
  source 1..15: mol_type = other DNA
ccaacctttgaggtc

SEQ ID NO: 20133 - DNA, 15 bp, synthetic construct
  source 1..15: mol_type = other DNA
gagtcactctcactt

SEQ ID NO: 20134 - DNA, 15 bp, synthetic construct
  source 1..15: mol_type = other DNA
tgctccttaatattt

SEQ ID NO: 20135 - DNA, 15 bp, synthetic construct
  source 1..15: mol_type = other DNA
gactcttatcccaac

SEQ ID NO: 20136 - DNA, 15 bp, synthetic construct
  source 1..15: mol_type = other DNA
ttgctatcctttctt

SEQ ID NO: 20137 - DNA, 15 bp, synthetic construct
  source 1..15: mol_type = other DNA
agggaggctgaagaa

SEQ ID NO: 20138 - DNA, 15 bp, synthetic construct
  source 1..15: mol_type = other DNA
agaccgtgaagaatg

SEQ ID NO: 20139 - DNA, 15 bp, synthetic construct
  source 1..15: mol_type = other DNA
gcgctactcacgaag

SEQ ID NO: 20140 - DNA, 15 bp, synthetic construct
  source 1..15: mol_type = other DNA
ccttggttggagtcg

SEQ ID NO: 20141 - DNA, 15 bp, synthetic construct
  source 1..15: mol_type = other DNA
catcctcttgtaaag

SEQ ID NO: 20142 - DNA, 15 bp, synthetic construct
  source 1..15: mol_type = other DNA
gtagtggtgaatctg

SEQ ID NO: 20143 - DNA, 15 bp, synthetic construct
  source 1..15: mol_type = other DNA
ttgctcttgtgcgag

SEQ ID NO: 20144 - DNA, 15 bp, synthetic construct
  source 1..15: mol_type = other DNA
ttccagagcgtttat

SEQ ID NO: 20145 - DNA, 15 bp, synthetic construct
  source 1..15: mol_type = other DNA
gctcatccatgcagt

SEQ ID NO: 20146 - DNA, 15 bp, synthetic construct
  source 1..15: mol_type = other DNA
tggcgggagttaatc

SEQ ID NO: 20147 - DNA, 15 bp, synthetic construct
  source 1..15: mol_type = other DNA
gcaccaaatgtgact

SEQ ID NO: 20148 - DNA, 15 bp, synthetic construct
  source 1..15: mol_type = other DNA
tctttagacctattc

SEQ ID NO: 20149 - DNA, 15 bp, synthetic construct
  source 1..15: mol_type = other DNA
tgtaaggattgatga

SEQ ID NO: 20150 - DNA, 15 bp, synthetic construct
  source 1..15: mol_type = other DNA
atcttcacttacagg

SEQ ID NO: 20151 - DNA, 15 bp, synthetic construct
  source 1..15: mol_type = other DNA
cacgtgagggtgatg

SEQ ID NO: 20152 - DNA, 15 bp, synthetic construct
  source 1..15: mol_type = other DNA
gaagaggccatcgtg

SEQ ID NO: 20153 - DNA, 15 bp, synthetic construct
  source 1..15: mol_type = other DNA
tccttgttcaccttc

SEQ ID NO: 20154 - DNA, 15 bp, synthetic construct
  source 1..15: mol_type = other DNA
tgttgtccttctcct

SEQ ID NO: 20155 - DNA, 15 bp, synthetic construct
  source 1..15: mol_type = other DNA
tgtcttctccggttg

SEQ ID NO: 20156 - DNA, 15 bp, synthetic construct
  source 1..15: mol_type = other DNA
atgaggtggaaagta

SEQ ID NO: 20157 - DNA, 15 bp, synthetic construct
  source 1..15: mol_type = other DNA
tgagactctgcatat

SEQ ID NO: 20158 - DNA, 15 bp, synthetic construct
  source 1..15: mol_type = other DNA
gtgccatattttggt

SEQ ID NO: 20159 - DNA, 15 bp, synthetic construct
  source 1..15: mol_type = other DNA
gaaccaaaggacaga

SEQ ID NO: 20160 - DNA, 15 bp, synthetic construct
  source 1..15: mol_type = other DNA
tcacttttcctgtta

SEQ ID NO: 20161 - DNA, 15 bp, synthetic construct
  source 1..15: mol_type = other DNA
ttaaagagtaatgcc

SEQ ID NO: 20162 - DNA, 15 bp, synthetic construct
  source 1..15: mol_type = other DNA
agtgataccagtgac

SEQ ID NO: 20163 - DNA, 15 bp, synthetic construct
  source 1..15: mol_type = other DNA
agggaggatggtgtg

SEQ ID NO: 20164 - DNA, 15 bp, synthetic construct
  source 1..15: mol_type = other DNA
cttccactggagata

SEQ ID NO: 20165 - DNA, 15 bp, synthetic construct
  source 1..15: mol_type = other DNA
tcatcatggtgaacc

SEQ ID NO: 20166 - DNA, 15 bp, synthetic construct
  source 1..15: mol_type = other DNA
tctctcaaaactcat

SEQ ID NO: 20167 - DNA, 15 bp, synthetic construct
  source 1..15: mol_type = other DNA
ttccacgcctaacgt

SEQ ID NO: 20168 - DNA, 15 bp, synthetic construct
  source 1..15: mol_type = other DNA
tgtcctctgggtacg

SEQ ID NO: 20169 - DNA, 15 bp, synthetic construct
  source 1..15: mol_type = other DNA
gttccccgtcgttac

SEQ ID NO: 20170 - DNA, 15 bp, synthetic construct
  source 1..15: mol_type = other DNA
ggtatagaagaaatc

SEQ ID NO: 20171 - DNA, 15 bp, synthetic construct
  source 1..15: mol_type = other DNA
tttccaaattccttt

SEQ ID NO: 20172 - DNA, 15 bp, synthetic construct
  source 1..15: mol_type = other DNA
cagttggtgctaata

SEQ ID NO: 20173 - DNA, 15 bp, synthetic construct
  source 1..15: mol_type = other DNA
ctagagataagtgta

SEQ ID NO: 20174 - DNA, 15 bp, synthetic construct
  source 1..15: mol_type = other DNA
attgctctagacaga

SEQ ID NO: 20175 - DNA, 15 bp, synthetic construct
  source 1..15: mol_type = other DNA
aagcatcccttttat

SEQ ID NO: 20176 - DNA, 15 bp, synthetic construct
  source 1..15: mol_type = other DNA
ggacaagaatgctat

SEQ ID NO: 20177 - DNA, 15 bp, synthetic construct
  source 1..15: mol_type = other DNA
ctgtacctatgtgga

SEQ ID NO: 20178 - DNA, 15 bp, synthetic construct
  source 1..15: mol_type = other DNA
atgtgacttctgctc

SEQ ID NO: 20179 - DNA, 15 bp, synthetic construct
  source 1..15: mol_type = other DNA
aaatttatttttcgg

SEQ ID NO: 20180 - DNA, 15 bp, synthetic construct
  source 1..15: mol_type = other DNA
aatcatacctgtgat

SEQ ID NO: 20181 - DNA, 15 bp, synthetic construct
  source 1..15: mol_type = other DNA
ttgaatgtttgagta

SEQ ID NO: 20182 - DNA, 15 bp, synthetic construct
  source 1..15: mol_type = other DNA
aatcctctccaatga

SEQ ID NO: 20183 - DNA, 15 bp, synthetic construct
  source 1..15: mol_type = other DNA
atgggctgttgaaga

SEQ ID NO: 20184 - DNA, 15 bp, synthetic construct
  source 1..15: mol_type = other DNA
tagcaggttttctac

SEQ ID NO: 20185 - DNA, 15 bp, synthetic construct
  source 1..15: mol_type = other DNA
ctttaacctgtctta

SEQ ID NO: 20186 - DNA, 15 bp, synthetic construct
  source 1..15: mol_type = other DNA
ttgcaacctaacttg

SEQ ID NO: 20187 - DNA, 15 bp, synthetic construct
  source 1..15: mol_type = other DNA
tctttggttttcccg

SEQ ID NO: 20188 - DNA, 15 bp, synthetic construct
  source 1..15: mol_type = other DNA
tgctaggtgttcttg

SEQ ID NO: 20189 - DNA, 15 bp, synthetic construct
  source 1..15: mol_type = other DNA
tacttgcccagcatt

SEQ ID NO: 20190 - DNA, 15 bp, synthetic construct
  source 1..15: mol_type = other DNA
tactattgtaacacc

SEQ ID NO: 20191 - DNA, 15 bp, synthetic construct
  source 1..15: mol_type = other DNA
ccagttactatcatt

SEQ ID NO: 20192 - DNA, 15 bp, synthetic construct
  source 1..15: mol_type = other DNA
cattttgaacctgag

SEQ ID NO: 20193 - DNA, 15 bp, synthetic construct
  source 1..15: mol_type = other DNA
ccgagttggaactac

SEQ ID NO: 20194 - DNA, 15 bp, synthetic construct
  source 1..15: mol_type = other DNA
agcacttcagcttct

SEQ ID NO: 20195 - DNA, 15 bp, synthetic construct
  source 1..15: mol_type = other DNA
cgcagtcacacctct

SEQ ID NO: 20196 - DNA, 15 bp, synthetic construct
  source 1..15: mol_type = other DNA
ctgactgtccccact

SEQ ID NO: 20197 - DNA, 15 bp, synthetic construct
  source 1..15: mol_type = other DNA
ttagggatgcggaag

SEQ ID NO: 20198 - DNA, 15 bp, synthetic construct
  source 1..15: mol_type = other DNA
ccaggccgtgtccaa

SEQ ID NO: 20199 - DNA, 15 bp, synthetic construct
  source 1..15: mol_type = other DNA
atgcgtccccacaat

SEQ ID NO: 20200 - DNA, 15 bp, synthetic construct
  source 1..15: mol_type = other DNA
tgggaaacagtgcag

SEQ ID NO: 20201 - DNA, 15 bp, synthetic construct
  source 1..15: mol_type = other DNA
gatgggctcacgctg

SEQ ID NO: 20202 - DNA, 15 bp, synthetic construct
  source 1..15: mol_type = other DNA
taccccgttctgtcc

SEQ ID NO: 20203 - DNA, 15 bp, synthetic construct
  source 1..15: mol_type = other DNA
ctcccctcattcctc

SEQ ID NO: 20204 - DNA, 15 bp, synthetic construct
  source 1..15: mol_type = other DNA
ctggatgagctgcta

SEQ ID NO: 20205 - DNA, 15 bp, synthetic construct
  source 1..15: mol_type = other DNA
ttttggaagcgtagg

SEQ ID NO: 20206 - DNA, 15 bp, synthetic construct
  source 1..15: mol_type = other DNA
aggccctgggtctac

SEQ ID NO: 20207 - DNA, 15 bp, synthetic construct
  source 1..15: mol_type = other DNA
accctctctccttgc

SEQ ID NO: 20208 - DNA, 15 bp, synthetic construct
  source 1..15: mol_type = other DNA
taagaagggcctgga

SEQ ID NO: 20209 - DNA, 15 bp, synthetic construct
  source 1..15: mol_type = other DNA
gaatgtcctttccca

SEQ ID NO: 20210 - DNA, 15 bp, synthetic construct
  source 1..15: mol_type = other DNA
cttcctcaggctgct

SEQ ID NO: 20211 - DNA, 15 bp, synthetic construct
  source 1..15: mol_type = other DNA
aagagaccgttgggg

SEQ ID NO: 20212 - DNA, 15 bp, synthetic construct
  source 1..15: mol_type = other DNA
ctgggcaagaagtcg

SEQ ID NO: 20213 - DNA, 15 bp, synthetic construct
  source 1..15: mol_type = other DNA
ttgcgcaaggtggac

SEQ ID NO: 20214 - DNA, 15 bp, synthetic construct
  source 1..15: mol_type = other DNA
agggttggagtgggt

SEQ ID NO: 20215 - DNA, 15 bp, synthetic construct
  source 1..15: mol_type = other DNA
atgctccccctggtc

SEQ ID NO: 20216 - DNA, 15 bp, synthetic construct
  source 1..15: mol_type = other DNA
gcaaaggcggtcagg

SEQ ID NO: 20217 - DNA, 15 bp, synthetic construct
  source 1..15: mol_type = other DNA
gccccgccctcgtcc

SEQ ID NO: 20218 - DNA, 15 bp, synthetic construct
  source 1..15: mol_type = other DNA
gacccgggtgggtga

SEQ ID NO: 20219 - DNA, 15 bp, synthetic construct
  source 1..15: mol_type = other DNA
ccaccgctgcttgcc

SEQ ID NO: 20220 - DNA, 15 bp, synthetic construct
  source 1..15: mol_type = other DNA
gacaagaggccctga

SEQ ID NO: 20221 - DNA, 15 bp, synthetic construct
  source 1..15: mol_type = other DNA
cctcacctggtcgaa

SEQ ID NO: 20222 - DNA, 15 bp, synthetic construct
  source 1..15: mol_type = other DNA
cagaggagcccattt

SEQ ID NO: 20223 - DNA, 15 bp, synthetic construct
  source 1..15: mol_type = other DNA
gcaggacactctcag

SEQ ID NO: 20224 - DNA, 15 bp, synthetic construct
  source 1..15: mol_type = other DNA
agaacctctggagca

SEQ ID NO: 20225 - DNA, 15 bp, synthetic construct
  source 1..15: mol_type = other DNA
tttgtattttttgta

SEQ ID NO: 20226 - DNA, 15 bp, synthetic construct
  source 1..15: mol_type = other DNA
acgtatcaggtagtc

SEQ ID NO: 20227 - DNA, 15 bp, synthetic construct
  source 1..15: mol_type = other DNA
gccgtatgcaaatag

SEQ ID NO: 20228 - DNA, 15 bp, synthetic construct
  source 1..15: mol_type = other DNA
gcccttcaccgccta

SEQ ID NO: 20229 - DNA, 15 bp, synthetic construct
  source 1..15: mol_type = other DNA
tgcctccgctctggg

SEQ ID NO: 20230 - DNA, 15 bp, synthetic construct
  source 1..15: mol_type = other DNA
tggtctcttgcaaca

SEQ ID NO: 20231 - DNA, 15 bp, synthetic construct
  source 1..15: mol_type = other DNA
agacagcttatgcgg

SEQ ID NO: 20232 - DNA, 15 bp, synthetic construct
  source 1..15: mol_type = other DNA
tgtcaaacatgcaga

SEQ ID NO: 20233 - DNA, 15 bp, synthetic construct
  source 1..15: mol_type = other DNA
cacacttaccactgt

SEQ ID NO: 20234 - DNA, 15 bp, synthetic construct
  source 1..15: mol_type = other DNA
cagtacctgtttaat

SEQ ID NO: 20235 - DNA, 15 bp, synthetic construct
  source 1..15: mol_type = other DNA
aactgagtgagtgtc

SEQ ID NO: 20236 - DNA, 15 bp, synthetic construct
  source 1..15: mol_type = other DNA
ttcaggatctgtgag

SEQ ID NO: 20237 - DNA, 15 bp, synthetic construct
  source 1..15: mol_type = other DNA
ctcaacgttcctaca

SEQ ID NO: 20238 - DNA, 15 bp, synthetic construct
  source 1..15: mol_type = other DNA
agtggtttgtttaca

SEQ ID NO: 20239 - DNA, 15 bp, synthetic construct
  source 1..15: mol_type = other DNA
agcataaaagtcacc

SEQ ID NO: 20240 - DNA, 15 bp, synthetic construct
  source 1..15: mol_type = other DNA
ggagcattttactca

SEQ ID NO: 20241 - DNA, 15 bp, synthetic construct
  source 1..15: mol_type = other DNA
tggaaagtggaatgt

SEQ ID NO: 20242 - DNA, 15 bp, synthetic construct
  source 1..15: mol_type = other DNA
gaagtgatgacgatc

SEQ ID NO: 20243 - DNA, 15 bp, synthetic construct
  source 1..15: mol_type = other DNA
catactcgacgatcg

SEQ ID NO: 20244 - DNA, 15 bp, synthetic construct
  source 1..15: mol_type = other DNA
gcaggtacttacacg

SEQ ID NO: 20245 - DNA, 15 bp, synthetic construct
  source 1..15: mol_type = other DNA
ctacttgtgggtttt

SEQ ID NO: 20246 - DNA, 15 bp, synthetic construct
  source 1..15: mol_type = other DNA
cttgactttgatgat

SEQ ID NO: 20247 - DNA, 15 bp, synthetic construct
  source 1..15: mol_type = other DNA
agacgatatctgtga

SEQ ID NO: 20248 - DNA, 15 bp, synthetic construct
  source 1..15: mol_type = other DNA
gctggaatacacctc

SEQ ID NO: 20249 - DNA, 15 bp, synthetic construct
  source 1..15: mol_type = other DNA
tacacgtccgtgaac

SEQ ID NO: 20250 - DNA, 15 bp, synthetic construct
  source 1..15: mol_type = other DNA
ttttcctgcagttgg

SEQ ID NO: 20251 - DNA, 15 bp, synthetic construct
  source 1..15: mol_type = other DNA
ctcgtcaggctcgac

SEQ ID NO: 20252 - DNA, 15 bp, synthetic construct
  source 1..15: mol_type = other DNA
ccgcgtctccagcga

SEQ ID NO: 20253 - DNA, 15 bp, synthetic construct
  source 1..15: mol_type = other DNA
agtagataaaagcag

SEQ ID NO: 20254 - DNA, 15 bp, synthetic construct
  source 1..15: mol_type = other DNA
cactctatgcaagca

SEQ ID NO: 20255 - DNA, 15 bp, synthetic construct
  source 1..15: mol_type = other DNA
atcttccaaagagtt

SEQ ID NO: 20256 - DNA, 15 bp, synthetic construct
  source 1..15: mol_type = other DNA
ttctaacagataaac

SEQ ID NO: 20257 - DNA, 15 bp, synthetic construct
  source 1..15: mol_type = other DNA
ctctcccattgtagt

SEQ ID NO: 20258 - DNA, 15 bp, synthetic construct
  source 1..15: mol_type = other DNA
ggttttgaacccttt

SEQ ID NO: 20259 - DNA, 15 bp, synthetic construct
  source 1..15: mol_type = other DNA
gtgaacttgtggaga

SEQ ID NO: 20260 - DNA, 15 bp, synthetic construct
  source 1..15: mol_type = other DNA
aacagttctgggaaa

SEQ ID NO: 20261 - DNA, 15 bp, synthetic construct
  source 1..15: mol_type = other DNA
cacggaatgaagatt

SEQ ID NO: 20262 - DNA, 15 bp, synthetic construct
  source 1..15: mol_type = other DNA
atatagacgaacact

SEQ ID NO: 20263 - DNA, 15 bp, synthetic construct
  source 1..15: mol_type = other DNA
tcatttccttgtttg

SEQ ID NO: 20264 - DNA, 15 bp, synthetic construct
  source 1..15: mol_type = other DNA
ctgcaaggaaagtga

SEQ ID NO: 20265 - DNA, 15 bp, synthetic construct
  source 1..15: mol_type = other DNA
agataagggcatgtc

SEQ ID NO: 20266 - DNA, 15 bp, synthetic construct
  source 1..15: mol_type = other DNA
ttctgtgccaactca

SEQ ID NO: 20267 - DNA, 15 bp, synthetic construct
  source 1..15: mol_type = other DNA
cattagaagcaaggt

SEQ ID NO: 20268 - DNA, 15 bp, synthetic construct
  source 1..15: mol_type = other DNA
aaggtgcttgcaatc

SEQ ID NO: 20269 - DNA, 15 bp, synthetic construct
  source 1..15: mol_type = other DNA
tatgatagccaagat

SEQ ID NO: 20270 - DNA, 15 bp, synthetic construct
  source 1..15: mol_type = other DNA
atacaggacttggct

SEQ ID NO: 20271 - DNA, 15 bp, synthetic construct
  source 1..15: mol_type = other DNA
tagtgaaaatgatga

SEQ ID NO: 20272 - DNA, 15 bp, synthetic construct
  source 1..15: mol_type = other DNA
agtattcacagtcat

SEQ ID NO: 20273 - DNA, 15 bp, synthetic construct
  source 1..15: mol_type = other DNA
gcactggctacaatt

SEQ ID NO: 20274 - DNA, 15 bp, synthetic construct
  source 1..15: mol_type = other DNA
acaacactgtgattc

SEQ ID NO: 20275 - DNA, 15 bp, synthetic construct
  source 1..15: mol_type = other DNA
gctctacctttagcc

SEQ ID NO: 20276 - DNA, 15 bp, synthetic construct
  source 1..15: mol_type = other DNA
atttccaatcagacg

SEQ ID NO: 20277 - DNA, 15 bp, synthetic construct
  source 1..15: mol_type = other DNA
cttttgcgggtgatt

SEQ ID NO: 20278 - DNA, 15 bp, synthetic construct
  source 1..15: mol_type = other DNA
ttcactccaaaagag

SEQ ID NO: 20279 - DNA, 15 bp, synthetic construct
  source 1..15: mol_type = other DNA
ctgttttcagtgtat

SEQ ID NO: 20280 - DNA, 15 bp, synthetic construct
  source 1..15: mol_type = other DNA
tgagaaaatgatttg

SEQ ID NO: 20281 - DNA, 15 bp, synthetic construct
  source 1..15: mol_type = other DNA
gtcacattccttcac

SEQ ID NO: 20282 - DNA, 15 bp, synthetic construct
  source 1..15: mol_type = other DNA
caaaccaaagggaag

SEQ ID NO: 20283 - DNA, 15 bp, synthetic construct
  source 1..15: mol_type = other DNA
tgaacagatttgcta

SEQ ID NO: 20284 - DNA, 15 bp, synthetic construct
  source 1..15: mol_type = other DNA
attaatgcaaagaaa
